(19) United States
(12) Patent Application Publication
(10) Pub. No.: US 2023/0097573 A1
(43) Pub. Date: Mar. 30, 2023

(54) NEONATAL FC RECEPTOR BINDING AFFIMERS

(71) Applicant: LG CHEM, LTD., Seoul (KR)

(72) Inventors: Yeonchul KIM, Seoul (KR); Jaehyung LEE, Seoul (KR); Saem JUNG, Seoul (KR); Joon Hee LEE, Seoul (KR); Gyeong Hyae PARK, Seoul (KR); Kyubong NA, Seoul (KR); Vincent MATTHEW, Amesbury, MA (US); Basran AMRIK, Cambridge (GB); Stanley EMMA, Hitchin (GB); Jenkins EMMA, Stansted (GB); Adam ESTELLE, Hitchin (GB)

(73) Assignee: LG CHEM, LTD., Seoul (KR)

(21) Appl. No.: 17/769,722

(22) PCT Filed: Oct. 16, 2020
(86) PCT No.: PCT/KR2020/014207

§ 371 Date: Apr. 15, 2022

Related U.S. Application Data
(60) Provisional application No. 62/915,790, filed on Oct. 16, 2019.

(51) Int. Cl. C07K 16/28; C12N 15/86; A61P 35/00; A61K 9/00

(52) U.S. Cl. CPC C07K 16/283; C12N 15/86; A61P 35/00; A61K 9/0019; A61K 2039/505

(57) ABSTRACT

Provided herein, in some embodiments, are AFFIMER® polypeptides that binds to the neonatal Fc receptor (FcRn) and extends the half-life of the polypeptides. Also provided herein, in some embodiments, are compositions containing the polypeptides, methods of using the polypeptides, and methods of producing the polypeptides.

### CROSS REFERENCE TO RELATED APPLICATION(S)

[0001] This application is a 35 U.S.C. 371 National Phase Entry application from PCT/KR2020/014207 filed on Oct. 16, 2020, which claims priority to and the benefit of U.S. Provisional Patent Application No. 62/915,790 on Oct. 16, 2019, the entire contents of all of which are incorporated herein by reference.

[0002] The instant application contains a Sequence Listing which has been submitted via EFS-Web and is hereby incorporated by reference in its entirety. Said Sequence Listing, created on Nov. 23, 2022, is named 3570-821_ST25.txt and is 596,533 bytes in size.

### TECHNICAL FIELD

[0003] The present invention relates to a polypeptide comprising an FcRn binding AFFIMER® sequence that binds to human FcRn.

### BACKGROUND ART

[0004] The neonatal Fc receptor (FcRn) binds with high affinity to IgG and albumin through non-overlapping sites at a mildly acidic pH (e.g., 5.0-6.5); however, it does not bind IgG or albumin at neutral pH. FcRn expression has been detected nearly ubiquitously in a number of tissues, including epithelial cells, endothelial cells, and cells of hematopoietic origin. It facilitates monitoring of IgG and serum albumin turnover, as its expression is upregulated in response to the proinflammatory cytokine, TNF-α and downregulated in response to IFN-γ FcRn has been used therapeutically to shuttle biologics across mucosal surfaces in order to improve drug absorption or distribution.

### DISCLOSURE

### Technical Problem

[0005] The neonatal Fc receptor (FcRn) binds with high affinity to IgG and albumin through non-overlapping sites at a mildly acidic pH (e.g., 5.0-6.5); however, it does not bind IgG or albumin at neutral pH.

### Technical Solution

[0006] An object of the present invention is to provide a polypeptide comprising an FcRn binding AFFIMER® sequence that binds to human FcRn.

[0007] Another object of the present invention is to provide a pharmaceutical preparations.

[0008] Another object of the present invention is to provide a methods that comprise administering to a subject having an autoimmune disease and/or an inflammatory disease.

[0009] Another object of the present invention is to provide a provide methods of increasing serum half-life of a therapeutic molecule.

[0010] Another object of the present invention is to provide a use of the polynucleotide for targeting FcRn.

[0011] A further object of the present invention is to provide a use of the polynucleotide for increasing serum half-life of a therapeutic molecule.

### Advantageous Effects

[0012] The present disclosure is based on the generation of AFFIMER® polypeptides that bind to human neonatal Fc receptor (FcRn) to extend, in a controlled manner, the serum half-life of any other therapeutic molecules (e.g., therapeutic AFFIMER® polypeptide, protein, nucleic acid, or drug) to which it is conjugated.

### DESCRIPTION OF DRAWINGS

[0013] FIG. 1 Example of LGC01 clones binding in a direct huFcRN ELISA at pH 6.

[0014] FIG. 2 Example of differential binding of LGC01 clones at pH 6 and 7.4 in a direct huFcRN ELISA.

[0015] FIGS. 3A-3C Analytical SEC-HPLC traces of purified FcRn AFFIMER® monomers and AVA04-FcRn binding AFFIMER® fusion.

[0016] FIGS. 4A-4B SDS-PAGE analysis of purified FcRn AFFIMER® monomers and AVA04-FcRn binding AFFIMER® fusion.

[0017] FIGS. 5A-5B FcRn binding ELISA showing the binding activity of purified FcRn AFFIMER® monomers and AVA04-FcRn binding AFFIMER® fusion at pH 6 and 7.

[0018] FIG. 6 FcRn competition ELISA showing the activity of FcRn AFFIMER® monomers and AVA04-FcRn binding AFFIMER® fusion.

[0019] FIG. 7 Flow Cytometry histogram of AFFIMER® clones that have high cell binding affinity at pH 6.0 and various binding affinities at pH 7.4.

[0020] FIG. 8 Confirmation of Affimer's cell binding using hFcRn over-expression CHO single clone cell line (pH 6.0 & pH 7.4).

[0021] FIG. 9 Demonstration of FcRn mediated recycling of the FcRn binding AFFIMER® polypeptides as determined using the human endothelial cell-based recycling assay.

### BEST MODE

[0022] Provided herein, in some aspects, is a half-life extension platform based on AFFIMER® polypeptides that bind (e.g., competitively or non-competitively) to neonatal Fc receptor (FcRn, such as human FcRn). A range of human FcRn-binding AFFIMER® polypeptides (referred to as anti-human FcRn AFFIMER® polypeptides), with a range of binding affinities, has been developed. These polypeptides have been shown in in vivo pharmacokinetic (PK) studies to extend, in a controlled manner, the serum half-life of any other AFFIMER® polypeptides to which they are conjugated (e.g., as a single genetic fusion) and can be made, for example, in bacterial cells (e.g., Escherichia coli). The FcRn-binding AFFIMER® polypeptides provided herein can also be used to extend the half-life of other polypeptides, such as therapeutic proteins.

[0023] In some aspects, the present invention relates to a polypeptide comprising an FcRn binding AFFIMER® sequence that binds to human FcRn with a K_{d} of 1×10-6M or less at pH 6.0, and (optionally) a K_{d} for binding human FcRn at pH 7.4 that is at least half a log greater than the K_{d} for binding at pH 6.0.

[0024] In some embodiments, the FcRn binding AFFIMER® sequence binds to FcRn with a K_{d} of 1×10⁻⁷ M or less at pH 6.0, a K_{d} of 1×10⁻⁸ M or less at pH 6.0, or K_{d} of 1×10⁻⁹ M or less at pH 6.0.

[0025] In some embodiments, the polypeptides at pH 6 bind to human FcRn with a K_{d} that is at least one log less than the K_{d} for binding to human FcRn at pH 7.4, at least 1.5 logs less than the K_{d} for binding to human FcRn at pH 7.4, at least 2 logs less than the K_{d} for binding to human FcRn at pH 7.4, or at least 2.5 log less than the K_{d} for binding to human FcRn at pH 7.4

[0026] In some embodiments, the FcRn binding AFFIMER® sequence binds to FcRn at pH 7.4 with a K_{d} that is at least one log greater than the K_{d} for binding to FcRn at pH 6.0, at least 1.5 logs greater than the K_{d} for binding to FcRn at pH 6, at least 2 logs greater than the K_{d} for binding to FcRn at pH 6, or at least 2.5 log greater than the IQ for binding to FcRn at pH 6.

[0027] In some embodiments, the FcRn binding AFFIMER® polypeptide sequence binds to human FcRn and the protein/polypeptide has a circulating half-life in human patients of at least 7 days, preferably 8, 9, 10, 11, 12, 13, 14, 15, 16, 17, 18, 19, 20 or even 21 days.

[0028] In some embodiments, the polypeptide has a serum half-life in human patients of greater than 10 hours, greater than 24 hours, greater than 48 hours, greater than 72 hours, greater than 96 hours, greater than 120 hours, greater than 144 hours, greater than 168 hours, greater than 192 hours, greater than 216 hours, greater than 240 hours, greater than 264 hours, greater than 288 hours, greater than 312 hours, greater than 336 hours or, greater than 360 hours.

[0029] In some embodiments, the polypeptide has a serum half-life in human patients of greater than 50%, greater than 60%, greater than 70%, or greater than 80% of the serum half-life of IgG.

[0030] In some embodiments, the polypeptide has a serum half-life in human patients of greater than 50%, greater than 60%, greater than 70%, or greater than 80% of the serum half-life of serum albumin.

[0031] In certain embodiments, the polypeptide does not inhibit binding of human serum albumin to human FcRn.

[0032] In certain embodiments, the polypeptide polypeptide does not inhibit binding of IgG to human FcRn.

[0033] In certain embodiments, binding of the polypeptide to human FcRn facilitates transport of the polypeptide from an apical side to a basal side of an epithelial cell layer.

[0034] Another aspect relates to a protein comprising an FcRn binding AFFIMER® polypeptide sequence which binds to human FcRn and facilitates transport of the protein across an epithelial tissue barrier.

[0035] In certain embodiments, the AFFIMER® polypeptide sequence has an amino acid sequence represented in general formula (I)

FR1-(Xaa)ₙ-FR2-(Xaa)ₘ-FR3 (I),

wherein FR1 is an amino acid sequence having at least 70% identity to MIPGGLSEAK PATPEIQEIV DKVKPQLEEK TNETYGKLEA VQYKTQVLA (SEQ ID NO: 1); FR2 is an amino acid sequence having at least 70% identity to GTNYYIKVRA GDNKYMHLKV FKSL (SEQ ID NO: 2); FR3 is an amino acid sequence having at least 70% identity to EDLVLTGYQV DKNKDDELTG F (SEQ ID NO: 3); Xaa, individually for each occurrence, is an amino acid, n is an integer from 3 to 20, and m is an integer from 3 to 20.

[0036] For instance, FR1 can be at least 80%, at least 82%, at least 84%, at least 86%, at least 88%, at least 90%, at least 92%, at least 94%, at least 96%, or at least 98% identity to SEQ ID NO: 1; FR2 has at least 80%, at least 84%, at least 88%, at least 92%, or at least 96% identity to SEQ ID NO: 2; and/or FR3 has at least 80%, at least 85%, at least 90%, or at least 95% identity to SEQ ID NO: 3. In certain embodiments, FR1 comprises the amino acid sequence of SEQ ID NO: 1, FR2 comprises the amino acid sequence of SEQ ID NO: 2, and FR3 comprises the amino acid sequence of SEQ ID NO: 3.

[0037] In certain embodiments, the AFFIMER® polypeptide sequence has an amino acid sequence wherein (Xaa)ₙ is an amino acid sequence represented in the general formula

-Xaa-Xaa2-Xaa3-Xaa4-Xaa5-Xaa6-Xaa7-Xaa-Xaa- (SEQ ID NO: 4)

wherein Xaa, Xaa2, Xaa3, Xaa4, Xaa5, Xaa6 and Xaa7, individually for each occurrence, is an amino acid residue, with the caveat that (i) at least two of Xaa2, Xaa3, Xaa4 or Xaa5 are selected from His, Lys or Arg, or (ii) at least two of Xaa4, Xaa5, Xaa6 or Xaa7 are selected from His, Lys or Arg. In certain preferred embodiments, at least three, and preferably four of Xaa2, Xaa3, Xaa4, Xaa5, Xaa6 or Xaa7 are selected from His, Lys or Arg.

[0038] In certain embodiments, the AFFIMER® polypeptide sequence has an amino acid sequence wherein (Xaa)ₙ is an amino acid sequence at least 75% identical to the Loop 2 sequence selected from SEQ ID NOs: 6-299 and 1182, and more preferably at least 80%, 85%, 90%, or 95% identical. In certain embodiments, Loop 2 sequence is selected from SEQ ID NOs: 6-299 and 1182.

[0039] In certain embodiments, the AFFIMER® polypeptide sequence has an amino acid sequence wherein (Xaa)ₙ, is an amino acid sequence represented in the general formula

-Xaa-Xaa8-Xaa9-Xaa10-Xaa11-Xaa12-Xaa13-Xaa14-Xaa- (SEQ ID NO: 5)

wherein Xaa, Xaa8, Xaa9, Xaa10, Xaa11, Xaa12, Xaa13 and Xaa14, individually for each occurrence, is an amino acid residue, with the caveat that at least three of Xaa8, Xaa9, Xaa10, Xaa11, Xaa12, Xaa13 and Xaa14 are selected from His, Lys or Arg, and at least an additional two of Xaa8, Xaa9, Xaa10, Xaa11, Xaa12, Xaa13 and Xaa14 are selected from His, Lys, Arg, Phe, Tyr or Trp.

[0040] In certain embodiments, the AFFIMER® polypeptide sequence has an amino acid sequence wherein (Xaa)ₘ is an amino acid sequence at least 75% identical to the Loop 4 sequence selected from SEQ ID NOs: 300-593 and 1183, and more preferably at least 80%, 85%, 90%, or 95% identical. In certain embodiments, Loop 4 sequence is selected from SEQ ID NOs: 300-593 and 1183.

[0041] Another aspect relates to a protein comprising an FcRn binding AFFIMER® polypeptide sequence which binds to human FcRn and which is has an amino acid sequence that is at least 75% identical to an AFFIMER® polypeptide sequence selected from SEQ ID NOs: 594-887 and 1184, and more preferably 90%, 85%, 90% or even 95% identical. In certain embodiments, the FcRn binding AFFIMER® polypeptide sequence which binds to human FcRn and which is has an amino acid sequence that is identical to an AFFIMER® polypeptide sequence selected from SEQ ID NOs: 594-887 and 1184.

[0042] Yet another aspect relates to a protein comprising an FcRn binding AFFIMER® polypeptide sequence which binds to human FcRn and has an amino acid sequence that can be encoded by a nucleic acid having a coding sequence that hybridizes to any one of SEQ ID NOs: 888 to 1181 under stringent conditions of 6× sodium chloride/sodium citrate (SSC) at 45° C. followed by a wash in 0.2×SSC at 65° C.

[0043] Still another aspect relates to a protein comprising (i) an FcRn binding AFFIMER® polypeptide sequence which binds to human FcRn, and (ii) a heterologous polypeptide covalently associated to the FcRn binding AFFIMER® polypeptide sequence (optionally as a fusion protein or chemically conjugated) which confers a therapeutic activity in human patients.

[0044] In some embodiments, the polypeptides further comprise a heterologous polypeptide covalently linked through an amide bond to form a contiguous fusion protein.

[0045] In some embodiments, the heterologous polypeptide comprises a therapeutic polypeptide. In certain embodiments, the therapeutic polypeptide is selected from the group consisting of polypeptide hormones, polypeptide cytokines, polypeptide chemokines, growth factors, hemostasis active polypeptides, enzymes, and toxins. In certain embodiments, the therapeutic polypeptide is selected from the group consisting of receptor traps and receptor ligands. In certain embodiments, the therapeutic polypeptide sequence is selected from the group consisting of angiogenic agents and anti-angiogenic agents. In certain embodiments, the therapeutic polypeptide is a neurotransmitter, and optionally wherein the neurotransmitter is Neuropeptide Y. In certain embodiments, the therapeutic polypeptide is an erythropoiesis-stimulating agent, and optionally wherein the erythropoiesis-stimulating agent is erythropoietin or an erythropoietin mimetic. In certain embodiments, the therapeutic polypeptide is an incretin, and optionally wherein the incretin is selected from the group consisting of glucagon, gastric inhibitory peptide (GIP), glucagon-like peptide-1 (GLP-1), glucagon-like peptide-2 (GLP-2), peptide YY (PYY), and oxyntomodulin (OXM). In certain embodiments, the therapeutic polypeptide is an anticancer immune enhancing agent, such as a checkpoint inhibitor, a costimulatory receptor agonist or an iducer of innate immunity. In certain embodiments, the therapeutic polypeptide is an anti-inflammatory immune inhibiting agent, such as a checkpoint agonist, a costimulatory receptor antagonist or an inhibitor of innate immunity.

[0046] In some embodiments, the polypeptides extend the serum half-life of the heterologous polypeptide in vivo. For example, the heterologous polypeptide may have an extended half-life that is at least 2-fold, at least 5-fold, at least 10-fold, at least 20-fold, or at least 30-fold greater than the half-life of the heterologous polypeptide not linked to the AFFIMER® polypeptide.

[0047] In some embodiments, the polypeptides comprise a loop 2 amino acid sequence of any one of SEQ ID NOs: 6-299 and 1182. In some embodiments, the polypeptides comprise a loop 4 amino acid sequence of any one of SEQ ID NOs: 300-593 and 1183.

[0048] In some embodiments, the polypeptides comprise an amino acid sequence having at least 80%, at least 85%, at least 90%, at least 95%, at least 98%, or 100% identity to the sequence of any one of SEQ ID NOs: 594-887 or 1184.

[0049] In some embodiments, the polypeptides are encoded by a nucleic acid sequence having at least 70%, at least 75%, at least 80%, at least 85%, at least 90%, at least 95%, at least 98%, or 100% identity to the sequence of any one of SEQ ID NOs: 888-1181.

[0050] Other aspects of the present disclosure provide pharmaceutical preparations, e.g., for therapeutic use in a human patient, comprising any of the AFFIMER® polypeptides described herein, and a pharmaceutically acceptable excipient (e.g., carrier, buffer, and/or salt, etc.). In some embodiments, the pharmaceutical composition is formulated for pulmonary delivery. For example, the pharmaceutical composition may be formulated as an intranasal formulation. In other embodiments, the pharmaceutical composition is formulated for topical (e.g., transepithelial) delivery.

[0051] Further aspects of the present disclosure provide polynucleotides comprising a sequence encoding the AFFIMER® polypeptides described herein.

[0052] In some embodiments, the sequence encoding a polypeptide is operably linked to a transcriptional regulatory sequence. The transcriptional regulatory sequence may be, for example, a promoter or an enhancer. Other transcriptional regulatory sequence are contemplated herein.

[0053] In some embodiments, a polynucleotide further comprises an origin of replication, a minichromosome maintenance element (MME), and/or a nuclear localization element. In some embodiments, a polynucleotide further comprise a polyadenylation signal sequence operably linked and transcribed with the sequence encoding the polypeptide. In some embodiments, a polynucleotide further comprises at least one intronic sequence. In some embodiments, a polynucleotide further comprises at least one ribosome binding site transcribed with the sequence encoding the polypeptide.

[0054] In some embodiments, a polynucleotide is a deoxyribonucleic acid (DNA). In some embodiments, a polynucleotide is a ribonucleic acid (RNA).

[0055] Further aspects of the present disclosure provide viral vectors, plasmids, and/or minicircles comprising the AFFIMER® polypeptides described herein.

[0056] Other aspects of the present disclosure provide cells comprising the polypeptides polynucleotides, viral vectors, plasmids, and/or minicircles described herein.

[0057] Additional aspects of the present disclosure provide methods that comprise administering to a subject having an autoimmune disease and/or an inflammatory disease a therapeutically effective amount of the AFFIMER® polypeptides described herein.

[0058] Still other aspects of the present disclosure provide methods that comprise administering to a subject having a cancer a therapeutically effective amount of the AFFIMER® polypeptides described herein.

[0059] Yet other aspects of the present disclosure provide methods of increasing serum half-life of a therapeutic molecule, the method comprising conjugating the AFFIMER® polypeptides described herein to the therapeutic molecule.

[0060] Further aspects of the present disclosure provide methods of producing the polypeptides described herein, the methods comprising expressing in a host cell a nucleic acid encoding the polypeptide, and optionally isolating the polypeptide from the host cell.

[0061] It should be understood that any one of the AFFIMER® polypeptides described herein may include or exclude a signal sequence (e.g., ˜15-30 amino acids present at the N-terminus of the polypeptide) or a tag sequence (e.g., C-terminal polyhistadine (e.g., HHHHHH (SEQ ID NO: 1185))).

[0062] Still yet other aspects of the present disclosure provide use of the polynucleotide for targeting FcRn.

[0063] Still yet other aspects of the present disclosure provide use of the polynucleotide for increasing serum half-life of a therapeutic molecule.

### MODE FOR INVENTION

[0064] The present disclosure is based on the generation of AFFIMER® polypeptides that bind to human neonatal Fc receptor (FcRn) to extend, in a controlled manner, the serum half-life of any other therapeutic molecules (e.g., therapeutic AFFIMER® polypeptide, protein, nucleic acid, or drug) to which it is conjugated.

[0065] Based on naturally occurring proteins (Cystatins) that have been engineered to stably display two loops that create a binding surface, the human FcRn-binding AFFIMER® polypeptides of the present disclosure provide a number of advantages over antibodies, antibody fragments, and other non-antibody molecule-binding proteins. One is the small size of the AFFIMER® polypeptide itself. In its monomeric form it is about 14 kDa, or 1/10th the size of an antibody. This small size gives greater potential for increased tissue penetration, particularly in poorly vascularized and/or fibrotic target tissues (like tumors). AFFIMER® polypeptides have a simple protein structure (versus multi-domain antibodies), and as the AFFIMER® polypeptides do not require disulfide bonds or other post-translational modifications for function, these polypeptides can be manufactured in prokaryotic and eukaryotic systems.

[0066] Using libraries of AFFIMER® polypeptides (such as the phage display techniques described in the appended examples) as well as site directed mutagenesis, AFFIMER® polypeptides can be generated with tunable binding kinetics with ideal ranges for therapeutic uses. For instance, the AFFIMER® polypeptides can have high affinity for human FcRn, such as single digit nanomolar or lower K_{d} for monomeric AFFIMER® polypeptides, and picomolar K_{d} and avidity in multi-valent formats. The AFFIMER® polypeptides can be generated with tight binding kinetics for human FcRn, such as slow K_{off} rates in the 10⁻⁴ to 10⁻⁵ (s-1) range, which benefits target tissue localization.

[0067] The human FcRn-binding AFFIMER® polypeptides of the present disclosure include AFFIMER® polypeptides with exquisite selectivity.

[0068] Moreover, the human FcRn-binding AFFIMER® polypeptides can be readily formatted, allowing formats such as Fc fusions, whole antibody fusions, and in-line multimers to be generated and manufactured with ease.

[0069] The lack of need for disulfide bonds and post-translational modifications also permit many embodiments of proteins including the human FcRn-binding AFFIMER® polypeptides to be delivered therapeutically by expression of gene delivery constructs that are introduced into the tissues of a patient, including formats where the protein is delivered systemically (such as expression from muscle tissue) or delivered locally (such as through intratumoral gene delivery).

[0070] An AFFIMER® polypeptide (also referred to simply as an AFFIMER®) is a small, highly stable polypeptide (e.g., protein) that is a recombinantly engineered variant of stefin polypeptides. Thus, the term “AFFIMER® polypeptide” may be used interchangeably herein with the term “recombinantly engineered variant of stefin polypeptide”. The term “Affimer” may be used interchangeably with AFFIMER®, etc., and any term may be used without limitation. A stefin polypeptide is a subgroup of proteins in the cystatin superfamily—a family that encompasses proteins containing multiple cystatin-like sequences. The stefin subgroup of the cystatin family is relatively small (˜100 amino acids) single domain proteins. They receive no known post-translational modification, and lack disulfide bonds, suggesting that they will be able to fold identically in a wide range of extracellular and intracellular environments. Stefin A is a monomeric, single chain, single domain protein of 98 amino acids. The structure of stefin A has been solved, facilitating the rational mutation of stefin A into the AFFIMER® polypeptide. The only known biological activity of cystatins is the inhibition of cathepsin activity, has enabled exhaustively testing for residual biological activity of the engineered proteins.

[0071] AFFIMER® polypeptides display two peptide loops and an N-terminal sequence that can all be randomized to bind to desired target proteins with high affinity and specificity, in a similar manner to monoclonal antibodies. Stabilization of the two peptides by the stefin A protein scaffold constrains the possible conformations that the peptides can take, increasing the binding affinity and specificity compared to libraries of free peptides. These engineered non-antibody binding proteins are designed to mimic the molecular recognition characteristics of monoclonal antibodies in different applications. Variations to other parts of the stefin A polypeptide sequence can be carried out, with such variations improving the properties of these affinity reagents, such as increase stability, make them robust across a range of temperatures and pH, for example. In some embodiments, an AFFIMER® polypeptide includes a sequence derived from stefin A, sharing substantial identify with a stefin A wild type sequence, such as human stefin A. In some embodiments, an AFFIMER® polypeptide has an amino acid sequence that shares at least 25%, 35%, 45%, 55% or 60% identity to the sequences corresponding to human stefin A. For example, an AFFIMER® polypeptide may have an amino acid sequence that shares at least 70%, at least 80%, at least 85%, at least 90%, at least 92%, at least 94%, at least 95% identity, e.g., where the sequence variations do not adversely affect the ability of the scaffold to bind to the desired target, and e.g., which do not restore or generate biological functions such as those that are possessed by wild type stefin A, but which are abolished in mutational changes described herein.

[0072] As used herein, the term AFFIMER® may be used interchangeably with “recombinantly engineered variant of stefin polypeptide”.

[0073] Human Neonatal Fc Receptor (FcRn) Binding AFFIMER® Polypeptides

[0074] One aspect of the disclosure provides AFFIMER® polypeptides that bind human neonatal Fc receptor (FcRn) (referred to as anti-human FcRn AFFIMER® polypeptides). Human neonatal Fc receptor, also known as the Brambell receptor, is a protein encoded by the FCGRT gene. This Fc receptor is similar in structure to the MHC class I molecule and also associates with beta-2-microglobulin. FcRn includes a 40 kDa alpha heavy chain that non-covalently associates with the 12 kDa light chain β-2-microgobulin. The FcRn heavy chain comprises three extracellular domains (α1, α2, and α3), a transmembrane domain, and a 44 amino acid cytoplasmic tail. In humans, FcRn has a role in monitoring IgG and serum albumin turnover (Kuo T T et al. mAbs 2011; 3(5):422-430; and Roopenian D C et al. Nature Reviews 2007; 7(9):715-725). Neonatal Fc receptor expression is up-regulated by the proinflammatory cytokine, TNF-α, and down-regulated by IFN-γ. A representative human FcRn sequence is provided by UniProtKB Primary accession number X, and may include other human isoforms thereof.

[0075] FcRn-mediated transcytosis of IgG across epithelial cells is possible because FcRn binds IgG at acidic pH (<6.5) but not at neutral or higher pH. Thus, FcRn can bind IgG from the slightly acidic intestinal lumen and ensure efficient, unidirectional transport to the basolateral side where the pH is neutral to slightly basic (Kuo T T et al. Journal of Clinical Immunology 2010; 30(6):777-89).

[0076] FcRn extends the half-life of IgG and serum albumin by reducing lysosomal degradation in endothelial cells (Roopenian D C et al. 2007) and bone-marrow derived cells (Akilesh S. et al. Journal of Immunology 2007; 179(7):4580-4588). IgG, serum albumin and other serum proteins are continuously internalized through pinocytosis. Generally, serum proteins are transported from the endosomes to the lysosome, where they are degraded. The two most abundant serum proteins, IgG and serum albumin are bound by FcRn at the slightly acidic pH (<6.5) and recycled to the cell surface where they are released at the neutral pH (>7.0) of blood. In this way IgG and serum albumin avoids lysosomal degradation. This mechanism provides an explanation for the greater serum circulation half-life of IgG and serum albumin (Goebl N A et al. Molecular Biology of the Cell 2008; 19(12):5490-505; and Roopenian D et al. 2007)

[0077] Anti-human FcRn AFFIMER® polypeptides comprise an AFFIMER® polypeptide in which at least one of the solvent accessible loops is from the wild-type stefin A protein having amino acid sequences to enable an AFFIMER® polypeptide to bind human FcRn, selectively, and in some embodiments, with K_{d} of 10⁻⁶M or less.

[0078] In some embodiments, the polypeptides bind to human FcRn with a K_{d} of 1×10⁻⁹ M to 1×10⁻⁶ M at pH 7.4 to 7.6. In some embodiments, the polypeptides bind to human FcRn with a K_{d} of 1×10⁻⁶ M or less at pH 7.4 to 7.6. In some embodiments, the polypeptides bind to human FcRn with a K_{d} of 1×10⁻⁷ M or less at pH 7.4 to 7.6. In some embodiments, the polypeptides bind to human FcRn with a K_{d} of 1×10⁻⁸ M or less at pH 7.4 to 7.6. In some embodiments, the polypeptides bind to human FcRn with a K_{d} of 1×10⁻⁹ M or less at pH 7.4 to 7.6. In some embodiments, the polypeptides bind to human FcRn with a K_{d} of 1×10⁻⁹ M to 1×10⁻⁶ M at pH 7.4. In some embodiments, the polypeptides bind to human FcRn with a K_{d} of 1×10⁻⁶ M or less at pH 7.4. In some embodiments, the polypeptides bind to human FcRn with a K_{d} of 1×10⁻⁷ M or less at pH 7.4. In some embodiments, the polypeptides bind to human FcRn with a K_{d} of 1×10⁻⁸ M or less at pH 7.4. In some embodiments, the polypeptides bind to human FcRn with a K_{d} of 1×10⁻⁹ M or less at pH 7.4.

[0079] In some embodiments, the polypeptides at pH 5.8 to 6.2 bind to human FcRn with a K_{d} of half a log to 2.5 logs less than the K_{d} for binding to human FcRn at pH 7.4 to 7.6. In some embodiments, the polypeptides at pH 5.8 to 6.2 bind to human FcRn with a K_{d} that is at least half a log less than the K_{d} for binding to human FcRn at pH 7.4 to 7.6. In some embodiments, the polypeptides at pH 5.8 to 6.2 bind to human FcRn with a K_{d} that is at least one log less than the K_{d} for binding to human FcRn at pH 7.4 to 7.6. In some embodiments, the polypeptides at pH 5.8 to 6.2 bind to human FcRn with a K_{d} that is at least 1.5 logs less than the K_{d} for binding to human FcRn at pH 7.4 to 7.6. In some embodiments, the polypeptides at pH 5.8 to 6.2 bind to human FcRn with a K_{d} that is at least 2 logs less than the K_{d} for binding to human FcRn at pH 7.4 to 7.6. In some embodiments, the polypeptides at pH 5.8 to 6.2 bind to human FcRn with a IQ that is at least 2.5 log less than the K_{d} for binding to human FcRn at pH 7.4 to 7.6. In some embodiments, the polypeptides at pH 6 bind to human FcRn with a IQ of half a log to 2.5 logs less than the K_{d} for binding to human FcRn at pH 7.4. In some embodiments, the polypeptides at pH 6 bind to human FcRn with a K_{d} that is at least half a log less than the K_{d} for binding to human FcRn at pH 7.4. In some embodiments, the polypeptides at pH 6 bind to human FcRn with a K_{d} that is at least one log less than the K_{d} for binding to human FcRn at pH 7.4. In some embodiments, the polypeptides at pH 6 bind to human FcRn with a K_{d} that is at least 1.5 logs less than the K_{d} for binding to human FcRn at pH 7.4. In some embodiments, the polypeptides at pH 6 bind to human FcRn with a K_{d} that is at least 2 logs less than the K_{d} for binding to human FcRn at pH 7.4. In some embodiments, the polypeptides at pH 6 bind to human FcRn with a K_{d} that is at least 2.5 log less than the K_{d} for binding to human FcRn at pH 7.4

[0080] In some embodiments, the polypeptides have a serum half-life in human patients of greater than 10 hours. In some embodiments, the polypeptides have a serum half-life in human patients of greater than 24 hours. In some embodiments, the polypeptides have a serum half-life in human patients of greater than 48 hours. In some embodiments, the polypeptides have a serum half-life in human patients of greater than 72 hours. In some embodiments, the polypeptides have a serum half-life in human patients of greater than 96 hours. In some embodiments, the polypeptides have a serum half-life in human patients of greater than 120 hours. In some embodiments, the polypeptides have a serum half-life in human patients of greater than 144 hours. In some embodiments, the polypeptides have a serum half-life in human patients of greater than 168 hours. In some embodiments, the polypeptides have a serum half-life in human patients of greater than 192 hours. In some embodiments, the polypeptides have a serum half-life in human patients of greater than 216 hours. In some embodiments, the polypeptides have a serum half-life in human patients of greater than 240 hours. In some embodiments, the polypeptides have a serum half-life in human patients of greater than 264 hours. In some embodiments, the polypeptides have a serum half-life in human patients of greater than 288 hours. In some embodiments, the polypeptides have a serum half-life in human patients of greater than 312 hours. In some embodiments, the polypeptides have a serum half-life in human patients of greater than 336 hours. In some embodiments, the polypeptides have a serum half-life in human patients of greater than 360 hours. In some embodiments, the polypeptides have a serum half-life in human patients of 24 to 360 hours, 48 to 360 hours, 72 to 360 hours, 96 to 360 hours, or 120 to 360 hours.

[0081] In some embodiments, an anti-human FcRn AFFIMER® polypeptide comprises a loop 2 amino acid sequence selected from any one of SEQ ID NOS: 6-299 and 1182 (Table 1). In some embodiments, an anti-human FcRn AFFIMER® polypeptide comprises a loop 4 amino acid sequence selected from any one of SEQ ID NOS: 300-593 and 1183 (Table 1).

[0082] In some embodiments, (Xaa)ₙ comprises an amino acid sequence having at least 80% or at least 90% identity to the amino acid sequence of any one of SEQ ID NOS: 6-299 and 1182. In some embodiments, (Xaa)ₙ comprises an amino acid sequence having 80% to 90% identity to the amino acid sequence of any one of SEQ ID NOS: 6-299 and 1182. In some embodiments, (Xaa)ₙ comprises the amino acid sequence of any one of SEQ ID NOS: 6-299 and 1182.

[0083] In some embodiments, (Xaa)ₘ comprises an amino acid sequence having at least 80% or at least 90% identity to the amino acid sequence of any one of SEQ ID NOS: 300-593 and 1183. In some embodiments, (Xaa)ₘ comprises an amino acid sequence having 80% to 90% identity to the amino acid sequence of any one of SEQ ID NOS: 300-593 and 1183. In some embodiments, (Xaa)ₘ comprises the amino acid sequence of any one of SEQ ID NOS: 300-593 and 1183.

TABLE 1
Examples of Anti-FcRn AFFIMER®
Loop Sequences

| | | SEQ | | SEQ |
|---|---|---|---|---|
| | | ID | | ID |
| Name | Loop 2 | NO: | Loop 4 | NO: |
| FcRn-01 | HVIDHKYRH | 6 | KKVNHHYHK | 300 |
| FcRn-02 | LKGHKHHKT | 7 | WQAKHKDGK | 301 |
| FcRn-03 | HNHHKYPHG | 8 | IWSKHNWHW | 302 |
| FcRn-04 | VHKKHHKWF | 9 | KWQVARHDN | 303 |
| FcRn-05 | KRHADHPRV | 10 | AHNYTLVWY | 304 |
| FcRn-06 | QQPKQHGFH | 11 | SSGNKHKHH | 305 |
| FcRn-07 | HHGHRTHSV | 12 | VWAHHKKYY | 306 |
| FcRn-08 | KQHHWDVHR | 13 | KVKHTRIH | 307 |
| FcRn-09 | GGQPAKQHF | 14 | PNKHHHAHK | 308 |
| FcRn-10 | NHVRWKDHD | 15 | FIKRYKLQR | 309 |
| FcRn-11 | HSHHPEHWY | 16 | RKDWHVRKL | 310 |
| FcRn-12 | KVKTHDHQR | 17 | IHQHHSQDW | 311 |
| FcRn-13 | YREVSKRRT | 18 | NQKQGHKHK | 312 |
| FcRn-14 | VTKRAWLKI | 19 | FYAQKRTSY | 313 |
| FcRn-15 | HNHRHYSKG | 20 | AFNDGAVFI | 314 |
| FcRn-16 | KHHHHKHQH | 21 | VFLHNESHQ | 315 |
| FcRn-17 | HPHHVRSSV | 22 | KGHFHTHLV | 316 |
| FcRn-18 | ETPHERHKT | 23 | KRWLKHHAH | 317 |
| FcRn-19 | GTIQHVNQH | 24 | YGHKHHFHW | 318 |
| FcRn-20 | YNVGRKKHR | 25 | VHFFHDQSE | 319 |
| FcRn-21 | RRGPQKSSY | 26 | QKKNRHHQK | 320 |
| FcRn-22 | HDRHQKHWR | 27 | DLRKHKWKS | 321 |
| FcRn-23 | IPHHHKPRV | 28 | SFHHHRHSD | 322 |
| FcRn-24 | KGKHYHSQQ | 29 | EFYQGHWTN | 323 |
| FcRn-25 | HKHKHHHTN | 30 | VGHHWWLKE | 324 |
| FcRn-26 | GRHKHIQVH | 31 | VGTKHLRQS | 325 |
| FcRn-27 | PHQHKLHAH | 32 | KRRRHPSRG | 326 |
| FcRn-28 | RRDHVWHKG | 33 | NHVHNKHIH | 327 |
| FcRn-29 | SHRSHADRR | 34 | TQSHPHRHY | 328 |
| FcRn-30 | SSQNGYQGH | 35 | YRHHHHWHF | 329 |
| FcRn-31 | TEGGKKLRR | 36 | EWTHGKENH | 330 |
| FcRn-32 | KARHHQGHA | 37 | WYQFDGVSF | 331 |
| FcRn-33 | NHSQGRHHI | 38 | KKVRHEYAW | 332 |
| FcRn-34 | KYWKADWYW | 39 | EHSWWRRGH | 333 |
| FcRn-35 | HRQYPPGPH | 40 | YHFHHYYKH | 334 |
| FcRn-36 | RQHHHFYRT | 41 | WQNFHDPFD | 335 |
| FcRn-37 | PQQHQPDPT | 42 | ARQHHHHSH | 336 |
| FcRn-38 | LSFNNYHWH | 43 | KLRHDKLTH | 337 |
| FcRn-39 | HHSKHHHLH | 44 | NHKFQSYQP | 338 |
| FcRn-40 | HKYDRHSFK | 45 | GKHSGARHK | 339 |
| FcRn-41 | KHSRHHHAQY | 46 | NIHHEGKIP | 340 |
| FcRn-42 | RHHHSHFHL | 47 | IRQSSYKVH | 341 |
| FcRn-43 | RNHRHPHGQ | 48 | VQHRWSLHW | 342 |
| FcRn-44 | GHVEQVHFPY | 49 | GHKHHHHWS | 343 |
| FcRn-45 | EPHKHHYHL | 50 | VPGQQPIKN | 344 |
| FcRn-46 | WKKHNWKYK | 51 | WAAKRDWRN | 345 |
| FcRn-47 | IHHHTWGLK | 52 | YGDQPFKRH | 346 |
| FcRn-48 | KPKYHHHDI | 53 | GHHAKPHRW | 347 |
| FcRn-49 | QYWHSHETW | 54 | FLKVRTIRS | 348 |
| FcRn-50 | RKQYHLPWT | 55 | LSQFQTHLW | 349 |
| FcRn-51 | AIHWAHYIL | 56 | VLWRYYYPK | 350 |
| FcRn-52 | DWRKLTLF | 57 | HHQHWHVFP | 351 |
| FcRn-53 | TKSHKFAYH | 58 | IVQEFSLDQW | 352 |
| FcRn-54 | SKYVHWHKF | 59 | WKINNLYHE | 353 |
| FcRn-55 | KEQAAWVLH | 60 | FHYLHHTRS | 354 |
| FcRn-56 | HLQAPRNAY | 61 | KGWRNTHHK | 355 |
| FcRn-57 | GLTHRWRPH | 62 | IWSARSDKL | 356 |
| FcRn-58 | SHHRATDQV | 63 | KAYHTYWHH | 357 |
| FcRn-59 | NKWHIRFAT | 64 | FAQAHHHTQ | 358 |
| FcRn-60 | HIRDSLWIT | 65 | NWQWIPHWA | 359 |
| FcRn-61 | YHISLSFRE | 66 | KLDTLGQQR | 360 |
| FcRn-62 | IHWAGFFRG | 67 | WEWERHWLA | 361 |
| FcRn-63 | YYSERHFYK | 68 | FTLGREGWF | 362 |
| FcRn-64 | RQQQVHVPS | 69 | YRGNTFKIW | 363 |
| FcRn-65 | TKKNQLQGH | 70 | VHSLLQHHD | 364 |
| FcRn-66 | RDIHHHHHW | 71 | YIKRHWSNF | 365 |
| FcRn-67 | QRQYTTKVL | 72 | DNERNQVES | 366 |
| FcRn-68 | YWDWRFVEW | 73 | IGYELFTVK | 367 |
| FcRn-69 | GFSKPFKWY | 74 | YRAWIHWTS | 368 |
| FcRn-70 | IFQERLAGQ | 75 | QIKHSHHAW | 369 |
| FcRn-71 | KYDHHTQSL | 76 | VYAWYWDKW | 370 |
| FcRn-72 | KHAHTPFGP | 77 | AVWWDGRGW | 371 |
| FcRn-73 | SLSRWLWAE | 78 | WHTHKHYQK | 372 |
| FcRn-74 | HQQHTQRYR | 79 | AKLQFGHKH | 373 |
| FcRn-75 | HTISQHVST | 80 | SFRWHRF | 374 |
| FcRn-76 | DQWTWAHSR | 81 | DYHLRHHNH | 375 |
| FcRn-77 | WYRVWRWVW | 82 | VYKYGSENW | 376 |
| FcRn-78 | QKGSTHHNH | 83 | ARSQAGHHN | 377 |
| FcRn-79 | PEGRAGEPS | 84 | EHWWFTFGD | 378 |
| FcRn-80 | HTRHHVTLW | 85 | GWKYAPQVW | 379 |
| FcRn-81 | QRYYKHEYR | 86 | YFKLPPWEE | 380 |
| FcRn-82 | QWFHRREVK | 87 | PVHLHHKQH | 381 |
| FcRn-83 | HHLHATQPP | 88 | NWHIINKYD | 382 |
| FcRn-84 | KHWHQPVAK | 89 | AHWHDWV | 383 |
| FcRn-85 | YTTSHWTIG | 90 | DHHHVQKSH | 384 |
| FcRn-86 | EHHHTQLSN | 91 | KFWQVQQKY | 385 |
| FcRn-87 | HKPHNSKQI | 92 | KPRFNIHHH | 386 |
| FcRn-88 | HHTKHHSRW | 93 | VNHISHAPI | 387 |
| FcRn-89 | FHRHHPIWH | 94 | LKPWEADLW | 388 |
| FcRn-90 | ARVTIDWKA | 95 | YKYPNIHPH | 389 |
| FcRn-91 | KLEQRRSHY | 96 | PKSLFNYQH | 390 |
| FcRn-92 | NIHHVHHQQ | 97 | DGEFHVKQV | 391 |
| FcRn-93 | SHHTIAWYV | 98 | VYPKRQQVE | 392 |
| FcRn-94 | HHQPYYGWQ | 99 | IIDRSKIEK | 393 |
| FcRn-95 | VHRSHHPIK | 100 | SIHSSWKKQ | 394 |
| FcRn-96 | WWSQRVKLF | 101 | NIHKTWDQT | 395 |
| FcRn-97 | HYWKPHDIH | 102 | GKVPFHAFHK | 396 |
| FcRn-98 | TNQPRLYHQ | 103 | FYRLTHGHR | 397 |
| FcRn-99 | WSGKLLKHP | 104 | HIDYKNGRIW | 398 |
| FcRn-100 | HRTSWDHKN | 105 | VFHHQRGGQ | 399 |
| FcRn-101 | PHKQKRHFFN | 106 | WGQSKPAHV | 400 |
| FcRn-102 | HDQHKHDFK | 107 | FHQRFPDHK | 401 |
| FcRn-103 | NRVVHHFHH | 108 | IQAAEGYKH | 402 |
| FcRn-104 | WHKAIRQQF | 109 | FHYQYRHQH | 403 |
| FcRn-105 | TKEWHQHIK | 110 | NKFLHGFEV | 404 |
| FcRn-106 | WYHTHFANA | 111 | FKRHQHGHK | 405 |
| FcRn-107 | TRVHNLSVL | 112 | HYDRAHYFK | 406 |
| FcRn-108 | WNQPYWTTY | 113 | FRWKFHDYK | 407 |
| FcRn-109 | RPHNRDSHR | 114 | DRKHRKHWH | 408 |
| FcRn-110 | GHPRHHWKY | 115 | ATYKYRVDY | 409 |
| FcRn-111 | YPGHHHARD | 116 | YFYHHHWFK | 410 |
| FcRn-112 | IAKHHTWHQ | 117 | YRNHRHHIV | 411 |
| FcRn-113 | HNHGHWHFR | 118 | VQHARHKHY | 412 |
| FcRn-114 | KKFDHYHQK | 119 | KDRHHHNR | 413 |
| FcRn-115 | SKAHRVEHK | 120 | KQHHLYHFK | 414 |
| FcRn-116 | PKKHYHHGI | 121 | VNSFQAHRH | 415 |
| FcRn-117 | NSHRIQHGF | 122 | SHHLHRSAH | 416 |
| FcRn-118 | PHHSHHRLE | 123 | QPTFRHHYT | 417 |
| FcRn-119 | HVHHHREKG | 124 | YSNSRERQW | 418 |
| FcRn-120 | KHKYHHTGH | 125 | GQIHKVRST | 419 |
| FcRn-121 | KYFAPHAPH | 126 | HYHHRHQHS | 420 |
| FcRn-122 | LHHRAHKHL | 127 | YFHREHEHQ | 421 |
| FcRn-123 | AHHGHYGRA | 128 | WHYHHSQWR | 422 |
| FcRn-124 | PEHYSLFKP | 129 | KHHRKHRHW | 423 |
| FcRn-125 | DHRPRHPKH | 130 | AHKHHLGFK | 424 |
| FcRn-126 | KHEVHHHGN | 131 | WHRHGSGFR | 425 |
| FcRn-127 | KSHHHKHRE | 132 | VDRFLHVKK | 426 |
| FcRn-128 | HRHHTHKWT | 133 | WPHSIDYRQ | 427 |
| FcRn-129 | GKHPHHHQN | 134 | KGRYSHHHG | 428 |
| FcRn-130 | WHKHHLRYR | 135 | YPQDKHKVL | 429 |
| FcRn-131 | KTHKEYHHS | 136 | GYRRHQGRG | 430 |
| FcRn-132 | RRHHHQHWS | 137 | ALHDTLHPS | 431 |
| FcRn-133 | THRWHQGSR | 138 | KKPHNHRYY | 432 |
| FcRn-134 | KRGHHHPNH | 139 | AKHHWDTWS | 433 |
| FcRn-135 | HTVPLRKHQ | 140 | VIHHKHRHQ | 434 |
| FcRn-136 | TYRWGHHFH | 141 | KYEQIDRWH | 435 |
| FcRn-137 | FKHHDRGTH | 142 | YRKRHTWFQ | 436 |
| FcRn-138 | TAKKHPKSH | 143 | KVNWHHYRH | 437 |
| FcRn-139 | HYHFSKHHN | 144 | SYHHKHFVK | 438 |
| FcRn-140 | YKHKHGKWR | 145 | WHGHFSKGGVAY | 439 |
| FcRn-141 | VHHKPHKTE | 146 | ATHLKHHNH | 440 |
| FcRn-142 | HGQRYHNKS | 147 | KRKWEHSHK | 441 |
| FcRn-143 | HKHHRHVPS | 148 | DHRHRHWYL | 442 |
| FcRn-144 | HRKHSWSRH | 149 | TKHSHSQLF | 443 |
| FcRn-145 | NRHYHQEYK | 150 | VHKSKHWFY | 444 |
| FcRn-146 | KIKHHHSFK | 151 | SQDHHFHRH | 445 |
| FcRn-147 | QHKRSHRQS | 152 | GHKYSHWSK | 446 |
| FcRn-148 | SVYKWKA | 153 | NKHHHHAHH | 447 |
| FcRn-149 | RKLERTKYH | 154 | HNKYHPHNK | 448 |
| FcRn-150 | TGHKHQFHQ | 155 | KHKHGWFHS | 449 |
| FcRn-151 | WQELGHRVY | 156 | YRRHHDKKH | 450 |
| FcRn-152 | HPHHTDQRH | 157 | EGHRQHAKF | 451 |
| FcRn-153 | FHNHGHPHL | 158 | NSRGHHHHK | 452 |
| FcRn-154 | WNHHHRNKQ | 159 | PHKRPHLYH | 453 |
| FcRn-155 | TRHGHRHYR | 160 | FYDLHPKLS | 454 |
| FcRn-156 | PHHRWHRQH | 161 | IHQHSQKKS | 455 |
| FcRn-157 | NLRHQTEHR | 162 | KRHHRHSHV | 456 |
| FcRn-158 | GHRKHTHLL | 163 | KKSHKAWAW | 457 |
| FcRn-159 | RHSKPQHWP | 164 | KGHKQHHHY | 458 |
| FcRn-160 | PHRSRFHKQ | 165 | WKAERHKHY | 459 |
| FcRn-161 | QRKHFHWDH | 166 | QHRYTHHHT | 460 |
| FcRn-162 | NKHHGQQHN | 167 | SHKVHTHSK | 461 |
| FcRn-163 | KYHHKYKSY | 168 | KHLDQYHPS | 462 |
| FcRn-164 | REWHHQTYY | 169 | SAHKHHHNH | 463 |
| FcRn-165 | RHYHDHHYR | 170 | KYKHQVKQH | 464 |
| FcRn-166 | SHTYRHSTG | 171 | ISHRHRHDI | 465 |
| FcRn-167 | NHRHHHPHF | 172 | NYHAHRSFY | 466 |
| FcRn-168 | HAKTRHHEH | 173 | WFKHHFWHR | 467 |
| FcRn-169 | EPHQKHKRH | 174 | KRKGDFLNY | 468 |
| FcRn-170 | DRRHQHGRH | 175 | HKPWGHHKL | 469 |
| FcRn-171 | HQHRHNLQQ | 176 | QYKHKHWLW | 470 |
| FcRn-172 | KRIHTWHTD | 177 | FKRHHSWHH | 471 |
| FcRn-173 | YHHQPRYQQ | 178 | KDRHHEFRH | 472 |
| FcRn-174 | GIGRHRRRR | 179 | HHHHFHNHR | 473 |
| FcRn-175 | DQHKQHYHF | 180 | SVNQHFKHK | 474 |
| FcRn-176 | GRHHESHKS | 181 | FQHKLHKHH | 475 |
| FcRn-177 | KRHHHWHYS | 182 | DTRYDKWHG | 476 |
| FcRn-178 | NRKGGHRYH | 183 | HVHRVQHSK | 477 |
| FcRn-179 | RKWHGHWHR | 184 | WNYQFKSAS | 478 |
| FcRn-180 | NWKRHHYHR | 185 | QWWFHKHVK | 479 |
| FcRn-181 | TRHHHRNRF | 186 | ISHNPNHYH | 480 |
| FcRn-182 | VKWDFKHFY | 187 | TNLHSPDSP | 481 |
| FcRn-183 | SDDLSPVKW | 188 | FDKYNSHYL | 482 |
| FcRn-184 | RHRQKWPIH | 189 | STHQQKHQW | 483 |
| FcRn-185 | DRHAYHRH | 190 | FHEEIKHWQ | 484 |
| FcRn-186 | HRHHQKHAF | 191 | WRDWNHRFP | 485 |
| FcRn-187 | QKGKHHDYR | 192 | KPHQTKWHH | 486 |
| FcRn-188 | WNKHFYKQG | 193 | RHHRQSHHW | 487 |
| FcRn-189 | KRRHNREFV | 194 | IRHYHADRE | 488 |
| FcRn-190 | TRHVRHWTH | 195 | ASQVPPKHR | 489 |
| FcRn-191 | NRKWQQNHH | 196 | KHKHWHHQL | 490 |
| FcRn-192 | RHREKHQPY | 197 | WEHHRTRWQ | 491 |
| FcRn-193 | YHKHNSKHS | 198 | FKTFKEWHV | 492 |
| FcRn-194 | PAGQHKRKH | 199 | KGHRWHDFK | 493 |
| FcRn-195 | DRHKYPVRV | 200 | KHAWQHHKS | 494 |
| FcRn-196 | GNNNPQGHV | 201 | YKHFKHHWR | 495 |
| FcRn-197 | KQLHHHHYK | 202 | AHRKFFQWH | 496 |
| FcRn-198 | QKHNWHRWH | 203 | WTHRSQVKV | 497 |
| FcRn-199 | YKHLGYWQK | 204 | FQWFKVGVP | 498 |
| FcRn-200 | HQKNFEAWE | 205 | VRYYSKYQW | 499 |
| FcRn-201 | ERVRRRHPP | 206 | NGWHVGHHI | 500 |
| FcRn-202 | HKVHIFREP | 207 | TRFRHYLVT | 501 |
| FcRn-203 | VKSFHVHSH | 208 | SWRNVRPEF | 502 |
| FcRn-204 | WHKDPPPPW | 209 | FGHTFSWRY | 503 |
| FcRn-205 | HRYAHNHFL | 210 | FKHQKFYRD | 504 |
| FcRn-206 | VSHALKTHT | 211 | WRNKWRAQD | 505 |
| FcRn-207 | HQSRAIYVY | 212 | YQKSYFHRH | 506 |
| FcRn-208 | HHTTYHQHH | 213 | WRPRPVHWK | 507 |
| FcRn-209 | TWWRNVQHH | 214 | DPQYKRHGY | 508 |
| FcRn-210 | WNKHNYQHQ | 215 | VPHSVVHYK | 509 |
| FcRn-211 | QHTLRVHTV | 216 | AYSQSFIHH | 510 |
| FcRn-212 | NQHFHQAGH | 217 | FSHSTWRYH | 511 |
| FcRn-213 | RQWTDRVWV | 218 | SKKHQQHW | 512 |
| FcRn-214 | DHDYFHHNK | 219 | AKHPRIHVT | 513 |
| FcRn-215 | YWDVGPGFN | 220 | SPWHHPTHF | 514 |
| FcRn-216 | GIHGHHEYY | 221 | SNWFHHKHR | 515 |
| FcRn-217 | WQRSRYGKY | 222 | AYWPYQKPT | 516 |
| FcRn-218 | YHQQHWRVH | 223 | ILVGYNWHY | 517 |
| FcRn-219 | ATRNSYPRH | 224 | VHSHLPRHP | 518 |
| FcRn-220 | EHHHAHWAT | 225 | LFLHGVHIF | 519 |
| FcRn-221 | KQHQRSFII | 226 | TSLPSEWFQ | 520 |
| FcRn-222 | QFWGHRVEH | 227 | TRHYHQRNR | 521 |
| FcRn-223 | FPSSHRTSY | 228 | YSAHHIRWH | 522 |
| FcRn-224 | SSKYIDHRQ | 229 | ERAQHHTHP | 523 |
| FcRn-225 | YWRHEHSSP | 230 | WKKHHYGHY | 524 |
| FcRn-226 | ERAHYDHHY | 231 | SHHAHHSVQ | 525 |
| FcRn-227 | WRHKAYIYG | 232 | WKHWEHKPQ | 526 |
| FcRn-228 | PQIKEQYNG | 233 | AQVPVLLWY | 527 |
| FcRn-229 | FKKVARDHW | 234 | WVHFYPWQQ | 528 |
| FcRn-230 | AQKHHWHKT | 235 | WHLAHVFYT | 529 |
| FcRn-231 | VSQGHHSWD | 236 | SSHHHKNHH | 530 |
| FcRn-232 | WHLRGHPHY | 237 | TKQPHGVHY | 531 |
| FcRn-233 | HSHHHQPWE | 238 | EHRTHHLGK | 532 |
| FcRn-234 | RRFRVHLHQ | 239 | TNHRQDHPE | 533 |
| FcRn-235 | GRQTKSHQH | 240 | HRKTNWHSY | 534 |
| FcRn-236 | PYSRHHHQL | 241 | SGVHHAAVW | 535 |
| FcRn-237 | VHGDHTRAW | 242 | RYASSYWEW | 536 |
| FcRn-238 | DWQKRGRSW | 243 | NQSGVVVQV | 537 |
| FcRn-239 | YNWERFRKV | 244 | YHNHQHTIH | 538 |
| FcRn-240 | GWSRNVWFW | 245 | KQELGTKTT | 539 |
| FcRn-241 | SQTQHRRHH | 246 | LVPQHHQHQ | 540 |
| FcRn-242 | PNVKHKHRW | 247 | WHDIAGGHY | 541 |
| FcRn-243 | KHPAFHQHS | 248 | RHDLHYHYP | 542 |
| FcRn-244 | PHHHTDWRT | 249 | YWHWKVRRF | 543 |
| FcRn-245 | HTHKILHFH | 250 | DKQRYEDKQ | 544 |
| FcRn-246 | PNHHFFLQF | 251 | QHHHPHRHP | 545 |
| FcRn-247 | RRYIGHNYS | 252 | WHHFHNSYD | 546 |
| FcRn-248 | THYHHQWDP | 253 | IWYSHRPRA | 547 |
| FcRn-249 | DKKHGQYK | 254 | WDDHTLKWY | 548 |
| FcRn-250 | YHIQGVYWR | 255 | IAFWGPKRF | 549 |
| FcRn-251 | SRFKHHVRN | 256 | FPHRNKSDG | 550 |
| FcRn-252 | WHHQHHLLA | 257 | FKRSQQWEW | 551 |
| FcRn-253 | HNKHPSPRV | 258 | KHRYQPTHW | 552 |
| FcRn-254 | TWFHQHEQQ | 259 | YHDIWAWHV | 553 |
| FcRn-255 | WKEWRYHHQ | 260 | DFVKHHLHD | 554 |
| FcRn-256 | FTKHWDRWY | 261 | ISDHVHFGW | 555 |
| FcRn-257 | TRLYDHSVW | 262 | YHHRDHWGW | 556 |
| FcRn-258 | WEYQTHHPA | 263 | EWFTVGGIA | 557 |
| FcRn-259 | VHFRSHRDF | 264 | ERKHAHQHP | 558 |
| FcRn-260 | SRHTHHHRS | 265 | DSNLYNEWN | 559 |
| FcRn-261 | TARYEHAPT | 266 | TAKHSHKKH | 560 |
| FcRn-262 | RHRKESWYV | 267 | NWPHGIDPK | 561 |
| FcRn-263 | DHGYARGHH | 268 | KHIHEHKSE | 562 |
| FcRn-264 | TPHKIWHWH | 269 | TKKFHQHER | 563 |
| FcRn-265 | SYAQHTRLH | 270 | TRHHQHYYL | 564 |
| FcRn-266 | IDHRYHYLH | 271 | WYWTQHHRW | 565 |
| FcRn-267 | HGYNHRKVQ | 272 | YHVWNWRLK | 566 |
| FcRn-268 | GHLKAAPWH | 273 | FHHFRPHHH | 567 |
| FcRn-269 | KEKYASWER | 274 | FLNGKKRHV | 568 |
| FcRn-270 | KGHPHAHPH | 275 | WWKIHGSTV | 569 |
| FcRn-271 | PYRRHEHHQ | 276 | NSDFHHNQQ | 570 |
| FcRn-272 | GFPHWFVHN | 277 | THHLRYHHQ | 571 |
| FcRn-273 | FRRYQSFHY | 278 | FYKYHQVRW | 572 |
| FcRn-274 | PRYRHHVDY | 279 | YSFRDHHWW | 573 |
| FcRn-275 | DYLKRNFRY | 280 | PFYRNHHHE | 574 |
| FcRn-276 | RSHPGKHVH | 281 | FQLNLRWGQ | 575 |
| FcRn-277 | HHHRWAKWL | 282 | VHNFHDIRH | 576 |
| FcRn-278 | AAHHNHWHI | 283 | AQHGHVPFS | 577 |
| FcRn-279 | PVQKHAGSH | 284 | PWHNAEIKH | 578 |
| FcRn-280 | DNWRHWRIW | 285 | AGWSSNKAD | 579 |
| FcRn-281 | PRHHHWAF | 286 | KRQHHDVGQ | 580 |
| FcRn-282 | VSYDDITWV | 287 | NSSYGWLWW | 581 |
| FcRn-283 | PPHPRVQHY | 288 | AFRDHRAPH | 582 |
| FcRn-284 | KQFRHHQHE | 289 | KWWSTQGIV | 583 |
| FcRn-285 | EHHEYHYRY | 290 | FRPVHHIRI | 584 |
| FcRn-286 | HHHHRQHP | 291 | KVGQGVNLG | 585 |
| FcRn-287 | KLHQAHHWH | 292 | EWSNKHYQW | 586 |
| FcRn-288 | EYHHYGTSR | 293 | RQLKHHTNF | 587 |
| FcRn-289 | DNKHIPQRQ | 294 | RNHVAEKYW | 588 |
| FcRn-290 | HKQWQWTIV | 295 | AYKSDKIRK | 589 |
| FcRn-291 | YRIGHGVQH | 296 | YDKPYIVWI | 590 |
| FcRn-292 | DQVRRIPHH | 297 | HDKHPQSWA | 591 |
| FcRn-293 | EGKHEFRFQ | 298 | WDKHRQHLW | 592 |
| FcRn-294 | HYWGRWYKI | 299 | FHAFWHLAY | 593 |
| AVA04-2 | REGRQDWVL | 1182 | WVPFPHQQL | 1183 |
| 51 FX6 | | | | |

[0084] In some embodiments, an anti-human FcRn AFFIMER® polypeptide comprises an amino acid sequence selected from any one of SEQ ID NOS: 594-887 and 1184 (Table 2).

[0085] In some embodiments, an anti-human FcRn AFFIMER® polypeptide comprises an amino acid sequence having at least 80% or at least 90% identity to the amino acid sequence of any one of SEQ ID NOS: 594-887 and 1184. In some embodiments, an anti-human FcRn AFFIMER® polypeptide comprises an amino acid sequence having 80% to 90% identity to the amino acid sequence of any one of SEQ ID NOS: 594-887 and 1184. In some embodiments, an anti-human FcRn AFFIMER® polypeptide comprises the amino acid sequence of any one of SEQ ID NOS: 594-887 and 1184.

TABLE 2
Examples of Anti-FcRn AFFIMER®Polypeptide Sequences

| | | SEQ |
|---|---|---|
| Name | Protein Sequence | ID NO: |
| FcRn-01 | MIPRGLSEAKPATPEIQEIVDKVKPQLEEKTNETYGKLEAVQYKTQ | 594 |
| | VLAHVIDHKYRHSTNYYIKVRAGDNKYMHLKVFNGPKKVNHHY | |
| | HKADRVLTGYQVDKNKDDELTGF | |
| FcRn-02 | MIPRGLSEAKPATPEIQEIVDKVKPQLEEKTNETYGKLEAVQYKTQ | 595 |
| | VLALKGHKHHKTSTNYYIKVRAGDNKYMHLKVFNGPWQAKHKD | |
| | GKADRVLTGYQVDKNKDDELTGF | |
| FcRn-03 | MIPRGLSEAKPATPEIQEIVDKVKPQLEEKTNETYGKLEAVQYKTQ | 596 |
| | VLAHNHHKYPHGSTNYYIKVRAGDNKYMHLKVFNGPIWSKHNW | |
| | HWADRVLTGYQVDKNKDDELTGF | |
| FcRn-04 | MIPRGLSEAKPATPEIQEIVDKVKPQLEEKTNETYGKLEAVQYKTQ | 597 |
| | VLAVHKKHHKWFSTNYYIKVRAGDNKYMHLKVFNGPKWQVAR | |
| | HDNADRVLTGYQVDKNKDDELTGF | |
| FcRn-05 | MIPRGLSEAKPATPEIQEIVDKVKPQLEEKTNETYGKLEAVQYKTQ | 598 |
| | VLAKRHADHPRVSTNYYIKVRAGDNKYMHLKVFNGPAHNYTLV | |
| | WYADRVLTGYQVDKNKDDELTGF | |
| FcRn-06 | MIPRGLSEAKPATPEIQEIVDKVKPQLEEKTNETYGKLEAVQYKTQ | 599 |
| | VLAQQPKQHGFHSTNYYIKVRAGDNKYMHLKVFNGPSSGNKHKH | |
| | HADRVLTGYQVDKNKDDELTGF | |
| FcRn-07 | MIPRGLSEAKPATPEIQEIVDKVKPQLEEKTNETYGKLEAVQYKTQ | 600 |
| | VLAHHGHRTHSVSTNYYIKVRAGDNKYMHLKVFNGPVWAHHKK | |
| | YYADRVLTGYQVDKNKDDELTGF | |
| FcRn-08 | MIPRGLSEAKPATPEIQEIVDKVKPQLEEKTNETYGKLEAVQYKTQ | 601 |
| | VLAKQHHWDVHRSTNYYIKVRAGDNKYMHLKVFNGPKVKHTRI | |
| | HADRVLTGYQVDKNKDDELTGF | |
| FcRn-09 | MIPRGLSEAKPATPEIQEIVDKVKPQLEEKTNETYGKLEAVQYKTQ | 602 |
| | VLAGGQPAKQHFSTNYYIKVRAGDNKYMHLKVFNGPPNKHHHA | |
| | HKADRVLTGYQVDKNKDDELTGF | |
| FcRn-10 | MIPRGLSEAKPATPEIQEIVDKVKPQLEEKTNETYGKLEAVQYKTQ | 603 |
| | VLANHVRWKDHDSTNYYIKVRAGDNKYMHLKVFNGPFIKRYKLQ | |
| | RADRVLTGYQVDKNKDDELTGF | |
| FcRn-11 | MIPRGLSEAKPATPEIQEIVDKVKPQLEEKTNETYGKLEAVQYKTQ | 604 |
| | VLAHSHHPEHWYSTNYYIKVRAGDNKYMHLKVFNGPRKDWHVR | |
| | KLADRVLTGYQVDKNKDDELTGF | |
| FcRn-12 | MIPRGLSEAKPATPEIQEIVDKVKPQLEEKTNETYGKLEAVQYKTQ | 605 |
| | VLAKVKTHDHQRSTNYYIKVRAGDNKYMHLKVFNGPIHQHHSQD | |
| | WADRVLTGYQVDKNKDDELTGF | |
| FcRn-13 | MIPRGLSEAKPATPEIQEIVDKVKPQLEEKTNETYGKLEAVQYKTQ | 606 |
| | VLAYREVSKRRTSTNYYIKVRAGDNKYMHLKVFNGPNQKQGHKH | |
| | KADRVLTGYQVDKNKDDELTGF | |
| FcRn-14 | MIPRGLSEAKPATPEIQEIVDKVKPQLEEKTNETYGKLEAVQYKTQ | 607 |
| | VLAVTKRAWLKISTNYYIKVRAGDNKYMHLKVFNGPFYAQKRTS | |
| | YADRVLTGYQVDKNKDDELTGF | |
| FcRn-15 | MIPRGLSEAKPATPEIQEIVDKVKPQLEEKTNETYGKLEAVQYKTQ | 608 |
| | VLAHNHRHYSKGSTNYYIKVRAGDNKYMHLKVFNGPAFNDGAVF | |
| | IADRVLTGYQVDKNKDDELTGF | |
| FcRn-16 | MIPRGLSEAKPATPEIQEIVDKVKPQLEEKTNETYGKLEAVQYKTQ | 609 |
| | VLAKHHHHKHQHSTNYYIKVRAGDNKYMHLKVFNGPVFLHNESH | |
| | QADRVLTGYQVDKNKDDELTGF | |
| FcRn-17 | MIPRGLSEAKPATPEIQEIVDKVKPQLEEKTNETYGKLEAVQYKTQ | 610 |
| | VLAHPHHVRSSVSTNYYIKVRAGDNKYMHLKVFNGPKGHFHTHL | |
| | YADRVLTGYQVDKNKDDELTGF | |
| FcRn-18 | MIPRGLSEAKPATPEIQEIVDKVKPQLEEKTNETYGKLEAVQYKTQ | 611 |
| | VLAETPHERHKTSTNYYIKVRAGDNKYMHLKVFNGPKRWLKHHA | |
| | KADRVLTGYQVDKNKDDELTGF | |
| FcRn-19 | MIPRGLSEAKPATPEIQEIVDKVKPQLEEKTNETYGKLEAVQYKTQ | 612 |
| | VLAGTIQHVNQHSTNYYIKVRAGDNKYMHLKVFNGPYGHKHHFH | |
| | WADRVLTGYQVDKNKDDELTGF | |
| FcRn-20 | MIPRGLSEAKPATPEIQEIVDKVKPQLEEKTNETYGKLEAVQYKTQ | 613 |
| | VLAYNVGRKKHRSTNYYIKVRAGDNKYMHLKVFNGPVHFFHDQS | |
| | EADRVLTGYQVDKNKDDELTGF | |
| FcRn-21 | MIPRGLSEAKPATPEIQEIVDKVKPQLEEKTNETYGKLEAVQYKTQ | 614 |
| | VLARRGPQKSSYSTNYYIKVRAGDNKYMHLKVFNGPQKKNRHHQ | |
| | KADRVLTGYQVDKNKDDELTGF | |
| FcRn-22 | MIPRGLSEAKPATPEIQEIVDKVKPQLEEKTNETYGKLEAVQYKTQ | 615 |
| | VLAHDRHQKHWRSTNYYIKVRAGDNKYMHLKVFNGPDLRKHKW | |
| | KSADRVLTGYQVDKNKDDELTGF | |
| FcRn-23 | MIPRGLSEAKPATPEIQEIVDKVKPQLEEKTNETYGKLEAVQYKTQ | 616 |
| | VLAIPHHHKPRVSTNYYIKVRAGDNKYMHLKVFNGPSFHHHRHSD | |
| | ADRVLTGYQVDKNKDDELTGF | |
| FcRn-24 | MIPRGLSEAKPATPEIQEIVDKVKPQLEEKTNETYGKLEAVQYKTQ | 617 |
| | VLAKGKHYHSQQSTNYYIKVRAGDNKYMHLKVFNGPEFYQGHW | |
| | TN ADRVLTGYQVDKNKDDELTGF | |
| FcRn-25 | MIPRGLSEAKPATPEIQEIVDKVKPQLEEKTNETYGKLEAVQYKTQ | 618 |
| | VLAHKHKHHHTNSTNYYIKVRAGDNKYMHLKVFNGPVGHHWW | |
| | LKEADRVLTGYQVDKNKDDELTGF | |
| FcRn-26 | MIPRGLSEAKPATPEIQEIVDKVKPQLEEKTNETYGKLEAVQYKTQ | 619 |
| | VLAGRHKHIQVHSTNYYIKVRAGDNKYMHLKVFNGPVGTKHLRQ | |
| | S ADRVLTGYQVDKNKDDELTGF | |
| FcRn-27 | MIPRGLSEAKPATPEIQEIVDKVKPQLEEKTNETYGKLEAVQYKTQ | 620 |
| | VLAPHQHKLHAHSTNYYIKVRAGDNKYMHLKVFNGPKRRRHPSR | |
| | G ADRVLTGYQVDKNKDDELTGF | |
| FcRn-28 | MIPRGLSEAKPATPEIQEIVDKVKPQLEEKTNETYGKLEAVQYKTQ | 621 |
| | VLARRDHVWHKGSTNYYIKVRAGDNKYMHLKVFNGPNHVHNKH | |
| | IHADRVLTGYQVDKNKDDELTGF | |
| FcRn-29 | MIPRGLSEAKPATPEIQEIVDKVKPQLEEKTNETYGKLEAVQYKTQ | 622 |
| | VLASHRSHADRRSTNYYIKVRAGDNKYMHLKVFNGPTQSHPHRH | |
| | YADRVLTGYQVDKNKDDELTGF | |
| FcRn-30 | MIPRGLSEAKPATPEIQEIVDKVKPQLEEKTNETYGKLEAVQYKTQ | 623 |
| | VLASSQNGYQGHSTNYYIKVRAGDNKYMHLKVFNGPYRHHHHW | |
| | HFADRVLTGYQVDKNKDDELTGF | |
| FcRn-31 | MIPRGLSEAKPATPEIQEIVDKVKPQLEEKTNETYGKLEAVQYKTQ | 624 |
| | VLATEGGKKLRRSTNYYIKVRAGDNKYMHLKVFNGPEWTHGKEN | |
| | HADRVLTGYQVDKNKDDELTGF | |
| FcRn-32 | MIPRGLSEAKPATPEIQEIVDKVKPQLEEKTNETYGKLEAVQYKTQ | 625 |
| | VLAKARHHQGHASTNYYIKVRAGDNKYMHLKVFNGPWYQFDGV | |
| | SFADRVLTGYQVDKNKDDELTGF | |
| FcRn-33 | MIPRGLSEAKPATPEIQEIVDKVKPQLEEKTNETYGKLEAVQYKTQ | 626 |
| | VLANHSQGRHHISTNYYIKVRAGDNKYMHLKVFNGPKKVRHEYA | |
| | WADRVLTGYQVDKNKDDELTGF | |
| FcRn-34 | MIPRGLSEAKPATPEIQEIVDKVKPQLEEKTNETYGKLEAVQYKTQ | 627 |
| | VLAKYWKADWYWSTNYYIKVRAGDNKYMHLKVFNGPEHSWWR | |
| | RGHADRVLTGYQVDKNKDDELTGF | |
| FcRn-35 | MIPRGLSEAKPATPEIQEIVDKVKPQLEEKTNETYGKLEAVQYKTQ | 628 |
| | VLAHRQYPPGPHSTNYYIKVRAGDNKYMHLKVFNGPYHFHHYYK | |
| | HADRVLTGYQVDKNKDDELTGF | |
| FcRn-36 | MIPRGLSEAKPATPEIQEIVDKVKPQLEEKTNETYGKLEAVQYKTQ | 629 |
| | VLARQHHHFYRTSTNYYIKVRAGDNKYMHLKVFNGPWQNFHDPF | |
| | DADRVLTGYQVDKNKDDELTGF | |
| FcRn-37 | MIPRGLSEAKPATPEIQEIVDKVKPQLEEKTNETYGKLEAVQYKTQ | 630 |
| | VLAPQQHQPDPTSTNYYIKVRAGDNKYMHLKVFNGPARQHHHHS | |
| | HADRVLTGYQVDKNKDDELTGF | |
| FcRn-38 | MIPRGLSEAKPATPEIQEIVDKVKPQLEEKTNETYGKLEAVQYKTQ | 631 |
| | VLALSFNNYHWHSTNYYIKVRAGDNKYMHLKVFNGPKLRHDKLT | |
| | HADRVLTGYQVDKNKDDELTGF | |
| FcRn-39 | MIPRGLSEAKPATPEIQEIVDKVKPQLEEKTNETYGKLEAVQYKTQ | 632 |
| | VLAHHSKHHHLHSTNYYIKVRAGDNKYMHLKVFNGPNHKFQSYQ | |
| | PADRVLTGYQVDKNKDDELTGF | |
| FcRn-40 | MIPRGLSEAKPATPEIQEIVDKVKPQLEEKTNETYGKLEAVQYKTQ | 633 |
| | VLAHKYDRHSFKSTNYYIKVRAGDNKYMHLKVFNGPGKHSGARH | |
| | KADRVLTGYQVDKNKDDELTGF | |
| FcRn-41 | MIPRGLSEAKPATPEIQEIVDKVKPQLEEKTNETYGKLEAVQYKTQ | 634 |
| | VLAKHSRHHHAQYTNYYIKVRAGDNKYMHLKVFNGPNIHHEGKI | |
| | PADRVLTGYQVDKNKDDELTGF | |
| FcRn-42 | MIPRGLSEAKPATPEIQEIVDKVKPQLEEKTNETYGKLEAVQYKTQ | 635 |
| | VLARHHHSHFHLSTNYYIKVRAGDNKYMHLKVFNGPIRQSSYKVH | |
| | ADRVLTGYQVDKNKDDELTGF | |
| FcRn-43 | MIPRGLSEAKPATPEIQEIVDKVKPQLEEKTNETYGKLEAVQYKTQ | 636 |
| | VLARNHRHPHGQSTNYYIKVRAGDNKYMHLKVFNGPVQHRWSL | |
| | HWADRVLTGYQVDKNKDDELTGF | |
| FcRn-44 | MIPRGLSEAKPATPEIQEIVDKVKPQLEEKTNETYGKLEAVQYKTQ | 637 |
| | VLAGHVEQVHFPYTNYYIKVRAGDNKYMHLKVFNGPGHKHHHH | |
| | WSADRVLTGYQVDKNKDDELTGF | |
| FcRn-45 | MIPRGLSEAKPATPEIQEIVDKVKPQLEEKTNETYGKLEAVQYKTQ | 638 |
| | VLAEPHKHHYHLSTNYYIKVRAGDNKYMHLKVFNGPVPGQQPIK | |
| | N ADRVLTGYQVDKNKDDELTGF | |
| FcRn-46 | MIPRGLSEAKPATPEIQEIVDKVKPQLEEKTNETYGKLEAVQYKTQ | 639 |
| | VLAWKKHNWKYKSTNYYIKVRAGDNKYMHLKVFNGPWAAKRD | |
| | WRN ADRVLTGYQVDKNKDDELTGF | |
| FcRn-47 | MIPRGLSEAKPATPEIQEIVDKVKPQLEEKTNETYGKLEAVQYKTQ | 640 |
| | VLAIHHHTWGLKSTNYYIKVRAGDNKYMHLKVFNGPYGDQPFKR | |
| | KADRVLTGYQVDKNKDDELTGF | |
| FcRn-48 | MIPRGLSEAKPATPEIQEIVDKVKPQLEEKTNETYGKLEAVQYKTQ | 641 |
| | VLAKPKYHHHDISTNYYIKVRAGDNKYMHLKVFNGPGHHAKPHR | |
| | W ADRVLTGYQVDKNKDDELTGF | |
| FcRn-49 | MIPRGLSEAKPATPEIQEIVDKVKPQLEEKTNETYGKLEAVQYKTQ | 642 |
| | VLAQYWHSHETWSTNYYIKVRAGDNKYMHLKVFNGPFLKVRTIR | |
| | SADRVLTGYQVDKNKDDELTGF | |
| FcRn-50 | MIPRGLSEAKPATPEIQEIVDKVKPQLEEKTNETYGKLEAVQYKTQ | 643 |
| | VLARKQYHLPWTSTNYYIKVRAGDNKYMHLKVFNGPLSQFQTHL | |
| | WADRVLTGYQVDKNEDDELTGF | |
| FcRn-51 | MIPRGLSEAKPATPEIQEIVDKVKPQLEEKTNETYGKLEAVQYKTQ | 644 |
| | VLAAIHWAHYILSTNYYIKVRAGDNKYMHLKVFNGPVLWRYYYP | |
| | KADRVLTGYQVDKNKDDELTGF | |
| FcRn-52 | MIPRGLSEAKPATPEIQEIVDKVKPQLEEKTNETYGKLEAVQYKTQ | 645 |
| | VLADWRKLTLFSTNYYIKVRAGDNKYMHLKVFNGPHHQHWHVF | |
| | PADRVLTGYQVDKNKDDELTGF | |
| FcRn-53 | MIPRGLSEAKPATPEIQEIVDKVKPQLEEKTNETYGKLEAVQYKTQ | 646 |
| | VLATKSHKFAYHSTNYYIKVRAGDNKYMHLKVFNGPIVQEFSLDQ | |
| | WADRVLTGYQVDKNKDDELTGF | |
| FcRn-54 | MIPRGLSEAKPATPEIQEIVDKVKPQLEEKTNETYGKLEAVQYKTQ | 647 |
| | VLASKYVHWHKFSTNYYIKVRAGDNKYMHLKVFNGPWKINNLY | |
| | HEADRVLTGYQVDKNKDDELTGF | |
| FcRn-55 | MIPRGLSEAKPATPEIQEIVDKVKPQLEEKTNETYGKLEAVQYKTQ | 648 |
| | VLAKEQAAWVLHSTNYYIKVRAGDNKYMHLKVFNGPFHYLHHT | |
| | RSADRVLTGYQVDKNKDDELTGF | |
| FcRn-56 | MIPRGLSEAKPATPEIQEIVDKVKPQLEEKTNETYGKLEAVQYKTQ | 649 |
| | VLAHLQAPRNAYSTNYYIKVRAGDNKYMHLKVFNGPKGWRNTH | |
| | HKADRVLTGYQVDKNKDDELTGF | |
| FcRn-57 | MIPRGLSEAKPATPEIQEIVDKVKPQLEEKTNETYGKLEAVQYKTQ | 650 |
| | VLAGLTHRWRPHSTNYYIKVRAGDNKYMHLKVFNGPIWSARSDK | |
| | LADRVLTGYQVDKNKDDELTGF | |
| FcRn-58 | MIPRGLSEAKPATPEIQEIVDKVKPQLEEKTNETYGKLEAVQYKTQ | 651 |
| | VLASHHRATDQVSTNYYIKVRAGDNKYMHLKVFNGPKAYHTYW | |
| | HKADRVLTGYQVDKNKDDELTGF | |
| FcRn-59 | MIPRGLSEAKPATPEIQEIVDKVKPQLEEKTNETYGKLEAVQYKTQ | 652 |
| | VLANKWHIRFATSTNYYIKVRAGDNKYMHLKVFNGPFAQAHHHT | |
| | QADRVLTGYQVDKNKDDELTGF | |
| FcRn-60 | MIPRGLSEAKPATPEIQEIVDKVKPQLEEKTNETYGKLEAVQYKTQ | 653 |
| | VLAHIRDSLWITSTNYYIKVRAGDNKYMHLKVFNGPNWQWIPHW | |
| | AADRVLTGYQVDKNKDDELTGF | |
| FcRn-61 | MIPRGLSEAKPATPEIQEIVDKVKPQLEEKTNETYGKLEAVQYKTQ | 654 |
| | VLAYHISLSFRESTNYYIKVRAGDNKYMHLKVFNGPKLDTLGQQR | |
| | ADRVLTGYQVDKNKDDELTGF | |
| FcRn-62 | MIPRGLSEAKPATPEIQEIVDKVKPQLEEKTNETYGKLEAVQYKTQ | 655 |
| | VLAIHWAGFFRGSTNYYIKVRAGDNKYMHLKVFNGPWEWERHW | |
| | LAADRVLTGYQVDKNKDDELTGF | |
| FcRn-63 | MIPRGLSEAKPATPEIQEIVDKVKPQLEEKTNETYGKLEAVQYKTQ | 656 |
| | VLAYYSERHFYKSTNYYIKVRAGDNKYMHLKVFNGPFTLGREGW | |
| | F ADRVLTGYQVDKNKDDELTGF | |
| FcRn-64 | MIPRGLSEAKPATPEIQEIVDKVKPQLEEKTNETYGKLEAVQYKTQ | 657 |
| | VLARQQQVHVPSSTNYYIKVRAGDNKYMHLKVFNGPYRGNTFKI | |
| | W ADRVLTGYQVDKNKDDELTGF | |
| FcRn-65 | MIPRGLSEAKPATPEIQEIVDKVKPQLEEKTNETYGKLEAVQYKTQ | 658 |
| | VLATKKNQLQGHSTNYYIKVRAGDNKYMHLKVFNGPVHSLLQHH | |
| | D ADRVLTGYQVDKNKDDELTGF | |
| FcRn-66 | MIPRGLSEAKPATPEIQEIVDKVKPQLEEKTNETYGKLEAVQYKTQ | 659 |
| | VLARDIHHHHHWSTNYYIKVRAGDNKYMHLKVFNGPYIKRHWSN | |
| | F ADRVLTGYQVDKNKDDELTGF | |
| FcRn-67 | MIPRGLSEAKPATPEIQEIVDKVKPQLEEKTNETYGKLEAVQYKTQ | 660 |
| | VLAQRQYTTKVLSTNYYIKVRAGDNKYMHLKVFNGPDNERNQVE | |
| | S ADRVLTGYQVDKNKDDELTGF | |
| FcRn-68 | MIPRGLSEAKPATPEIQEIVDKVKPQLEEKTNETYGKLEAVQYKTQ | 661 |
| | VLAYWDWRFVEWSTNYYIKVRAGDNKYMHLKVFNGPIGYELFTV | |
| | KADRVLTGYQVDKNKDDELTGF | |
| FcRn-69 | MIPRGLSEAKPATPEIQEIVDKVKPQLEEKTNETYGKLEAVQYKTQ | 662 |
| | VLAGFSKPFKWYSTNYYIKVRAGDNKYMHLKVFNGPYRAWIHWT | |
| | SADRVLTGYQVDKNKDDELTGF | |
| FcRn-70 | MIPRGLSEAKPATPEIQEIVDKVKPQLEEKTNETYGKLEAVQYKTQ | 663 |
| | VLAIFQERLAGQSTNYYIKVRAGDNKYMHLKVFNGPQIKHSHHA | |
| | WADRVLTGYQVDKNKDDELTGF | |
| FcRn-71 | MIPRGLSEAKPATPEIQEIVDKVKPQLEEKTNETYGKLEAVQYKTQ | 664 |
| | VLAKYDHHTQSLSTNYYIKVRAGDNKYMHLKVFNGPVYAWYWD | |
| | KWADRVLTGYQVDKNKDDELTGF | |
| FcRn-72 | MIPRGLSEAKPATPEIQEIVDKVKPQLEEKTNETYGKLEAVQYKTQ | 665 |
| | VLAKHAHTPFGPSTNYYIKVRAGDNKYMHLKVFNGPAVWWDGR | |
| | GWADRVLTGYQVDKNKDDELTGF | |
| FcRn-73 | MIPRGLSEAKPATPEIQEIVDKVKPQLEEKTNETYGKLEAVQYKTQ | 666 |
| | VLASLSRWLWAESTNYYIKVRAGDNKYMHLKVFNGPWHTHKHY | |
| | QKADRVLTGYQVDKNKDDELTGF | |
| FcRn-74 | MIPRGLSEAKPATPEIQEIVDKVKPQLEEKTNETYGKLEAVQYKTQ | 667 |
| | VLAHQQHTQRYRSTNYYIKVRAGDNKYMHLKVFNGPAKLQFGH | |
| | KHADRVLTGYQVDKNKDDELTGF | |
| FcRn-75 | MIPRGLSEAKPATPEIQEIVDKVKPQLEEKTNETYGKLEAVQYKTQ | 668 |
| | VLAHTISQHVSTNYYIKVRAGDNKYMHLKVFNGPPISFRWHRFAD | |
| | RVLTGYQVDKNKDDELTGF | |
| FcRn-76 | MIPRGLSEAKPATPEIQEIVDKVKPQLEEKTNETYGKLEAVQYKTQ | 669 |
| | VLADQWTWAHSRSTNYYIKVRAGDNKYMHLKVFNGPDYHLRHH | |
| | NHADRVLTGYQVDKNKDDELTGF | |
| FcRn-77 | MIPRGLSEAKPATPEIQEIVDKVKPQLEEKTNETYGKLEAVQYKTQ | 670 |
| | VLAWYRVWRWVWSTNYYIKVRAGDNKYMHLKVFNGPVYKYGS | |
| | ENWADRVLTGYQVDKNKDDELTGF | |
| FcRn-78 | MIPRGLSEAKPATPEIQEIVDKVKPQLEEKTNETYGKLEAVQYKTQ | 671 |
| | VLAQKGSTHHNHSTNYYIKVRAGDNKYMHLKVFNGPARSQAGH | |
| | HNADRVLTGYQVDKNKDDELTGF | |
| FcRn-79 | MIPRGLSEAKPATPEIQEIVDKVKPQLEEKTNETYGKLEAVQYKTQ | 672 |
| | VLAPEGRAGEPSSTNYYIKVRAGDNKYMHLKVFNGPEHWWFTFG | |
| | DADRVLTGYQVDKNKDDELTGF | |
| FcRn-80 | MIPRGLSEAKPATPEIQEIVDKVKPQLEEKTNETYGKLEAVQYKTQ | 673 |
| | VLAHTRHHVTLWSTNYYIKVRAGDNKYMHLKVFNGPGWKYAPQ | |
| | VWADRVLTGYQVDKNKDDELTGF | |
| FcRn-81 | MIPRGLSEAKPATPEIQEIVDKVKPQLEEKTNETYGKLEAVQYKTQ | 674 |
| | VLAQRYYKHEYRSTNYYIKVRAGDNKYMHLKVFNGPYFKLPPWE | |
| | EADRVLTGYQVDKNKDDELTGF | |
| FcRn-82 | MIPRGLSEAKPATPEIQEIVDKVKPQLEEKTNETYGKLEAVQYKTQ | 675 |
| | VLAQWFHRREVKSTNYYIKVRAGDNKYMHLKVFNGPPVHLHHK | |
| | QHADRVLTGYQVDKNKDDELTGF | |
| FcRn-83 | MIPRGLSEAKPATPEIQEIVDKVKPQLEEKTNETYGKLEAVQYKTQ | 676 |
| | VLAHHLHATQPPSTNYYIKVRAGDNKYMHLKVFNGPNWHIINKY | |
| | DADRVLTGYQVDKNKDDELTGF | |
| FcRn-84 | MIPRGLSEAKPATPEIQEIVDKVKPQLEEKTNETYGKLEAVQYKTQ | 677 |
| | VLAKHWHQPVAKSTNYYIKVRAGDNKYMHLKVFNGPAHWHDW | |
| | VADRVLTGYQVDKNKDDELTGF | |
| FcRn-85 | MIPRGLSEAKPATPEIQEIVDKVKPQLEEKTNETYGKLEAVQYKTQ | 678 |
| | VLAYTTSHWTIGSTNYYIKVRAGDNKYMHLKVFNGPDHHHVQKS | |
| | HADRVLTGYQVDKNKDDELTGF | |
| FcRn-86 | MIPRGLSEAKPATPEIQEIVDKVKPQLEEKTNETYGKLEAVQYKTQ | 679 |
| | VLAEHHHTQLSNSTNYYIKVRAGDNKYMHLKVFNGPKFWQVQQ | |
| | KYADRVLTGYQVDKNKDDELTGF | |
| FcRn-87 | MIPRGLSEAKPATPEIQEIVDKVKPQLEEKTNETYGKLEAVQYKTQ | 680 |
| | VLAHKPHNSKQISTNYYIKVRAGDNKYMHLKVFNGPKPRFNIHHH | |
| | ADRVLTGYQVDKNKDDELTGF | |
| FcRn-88 | MIPRGLSEAKPATPEIQEIVDKVKPQLEEKTNETYGKLEAVQYKTQ | 681 |
| | VLAHHTKHHSRWSTNYYIKVRAGDNKYMHLKVFNGPVNHISHAP | |
| | IADRVLTGYQVDKNKDDELTGF | |
| FcRn-89 | MIPRGLSEAKPATPEIQEIVDKVKPQLEEKTNETYGKLEAVQYKTQ | 682 |
| | VLAFHRHHPIWHSTNYYIKVRAGDNKYMHLKVFNGPLKPWEADL | |
| | WADRVLTGYQVDKNKDDELTGF | |
| FcRn-90 | MIPRGLSEAKPATPEIQEIVDKVKPQLEEKTNETYGKLEAVQYKTQ | 683 |
| | VLAARVTIDWKASTNYYIKVRAGDNKYMHLKVFNGPYKYPNIHP | |
| | HADRVLTGYQVDKNKDDELTGF | |
| FcRn-91 | MIPRGLSEAKPATPEIQEIVDKVKPQLEEKTNETYGKLEAVQYKTQ | 684 |
| | VLAKLEQRRSHYSTNYYIKVRAGDNKYMHLKVFNGPPKSLFNYQ | |
| | HADRVLTGYQVDKNKDDELTGF | |
| FcRn-92 | MIPRGLSEAKPATPEIQEIVDKVKPQLEEKTNETYGKLEAVQYKTQ | 685 |
| | VLANIHHVHHQQSTNYYIKVRAGDNKYMHLKVFNGPDGEFHVKQ | |
| | VADRVLTGYQVDKNKDDELTGF | |
| FcRn-93 | MIPRGLSEAKPATPEIQEIVDKVKPQLEEKTNETYGKLEAVQYKTQ | 686 |
| | VLASHHTIAWYVSTNYYIKVRAGDNKYMHLKVFNGPVYPKRQQV | |
| | EADRVLTGYQVDKNKDDELTGF | |
| FcRn-94 | MIPRGLSEAKPATPEIQEIVDKVKPQLEEKTNETYGKLEAVQYKTQ | 687 |
| | VLAHHQPYYGWQSTNYYIKVRAGDNKYMHLKVFNGPIIDRSKIEK | |
| | ADRVLTGYQVDKNKDDELTGF | |
| FcRn-95 | MIPRGLSEAKPATPEIQEIVDKVKPQLEEKTNETYGKLEAVQYKTQ | 688 |
| | VLAVHRSHHPIKSTNYYIKVRAGDNKYMHLKVFNGPSIHSSWKKQ | |
| | ADRVLTGYQVDKNKDDELTGF | |
| FcRn-96 | MIPRGLSEAKPATPEIQEIVDKVKPQLEEKTNETYGKLEAVQYKTQ | 689 |
| | VLAWWSQRVKLFSTNYYIKVRAGDNKYMHLKVFNGPNIHKTWD | |
| | QTADRVLTGYQVDKNKDDELTGF | |
| FcRn-97 | MIPRGLSEAKPATPEIQEIVDKVKPQLEEKTNETYGKLEAVQYKTQ | 690 |
| | VLAHYWKPHDIHSTNYYIKVRAGDNKYMHLKVFNGPGKVPFHAF | |
| | HKADRVLTGYQVDKNKDDELTGF | |
| FcRn-98 | MIPRGLSEAKPATPEIQEIVDKVKPQLEEKTNETYGKLEAVQYKTQ | 691 |
| | VLATNQPRLYHQSTNYYIKVRAGDNKYMHLKVFNGPFYRLTHGH | |
| | RADRVLTGYQVDKNKDDELTGF | |
| FcRn-99 | MIPRGLSEAKPATPEIQEIVDKVKPQLEEKTNETYGKLEAVQYKTQ | 692 |
| | VLAWSGKLLKHPSTNYYIKVRAGDNKYMHLKVFNGPHIDYKNGR | |
| | IWADRVLTGYQVDKNKDDELTGF | |
| FcRn-10 | MIPRGLSEAKPATPEIQEIVDKVKPQLEEKTNETYGKLEAVQYKTQ | 693 |
| 0 | VLAHRTSWDHKNSTNYYIKVRAGDNKYMHLKVFNGPVFHHQRG | |
| | GQADRVLTGYQVDKNKDDELTGF | |
| FcRn-10 | MIPRGLSEAKPATPEIQEIVDKVKPQLEEKTNETYGKLEAVQYKTQ | 694 |
| 1 | VLAPHKQKRHFFNSTNYYIKVRAGDNKYMHLKVFNGPWGQSKPA | |
| | HVADRVLTGYQVDKNKDDELTGF | |
| FcRn-10 | MIPRGLSEAKPATPEIQEIVDKVKPQLEEKTNETYGKLEAVQYKTQ | 695 |
| 2 | VLAHDQHKHDFKSTNYYIKVRAGDNKYMHLKVFNGPFHQRFPDH | |
| | KADRVLTGYQVDKNKDDELTGF | |
| FcRn-10 | MIPRGLSEAKPATPEIQEIVDKVKPQLEEKTNETYGKLEAVQYKTQ | 696 |
| 3 | VLANRVVHHFHHSTNYYIKVRAGDNKYMHLKVFKGPIQAAEGYK | |
| | KADRVLTGYQVDKNKDDELTGF | |
| FcRn-10 | MIPRGLSEAKPATPEIQEIVDKVKPQLEEKTNETYGKLEAVQYKTQ | 697 |
| 4 | VLAWHKAIRQQFSTNYYIKVRAGDNKYMHLKVFNGPFHYQYRHQ | |
| | KADRVLTGYQVDKNKDDELTGF | |
| FcRn-10 | MIPRGLSEAKPATPEIQEIVDKVKPQLEEKTNETYGKLEAVQYKTQ | 698 |
| 5 | VLAWYHTHFANASTNYYIKVRAGDNKYMHLKVFNGPFKRHQHG | |
| | HKADRVLTGYQVDKNKDDELTGF | |
| FcRn-10 | MIPRGLSEAKPATPEIQEIVDKVKPQLEEKTNETYGKLEAVQYKTQ | 699 |
| 6 | VLATKEWHQHIKSTNYYIKVRAGDNKYMHLKVFNGPNKFLHGFE | |
| | VADRVLTGYQVDKNKDDELTGF | |
| FcRn-10 | MIPRGLSEAKPATPEIQEIVDKVKPQLEEKTNETYGKLEAVQYKTQ | 700 |
| 7 | VLATRVHNLSVLSTNYYIKVRAGDNKYMHLKVFNGPHYDRAHYF | |
| | KADRVLTGYQVDKNKDDELTGF | |
| FcRn-10 | MIPRGLSEAKPATPEIQEIVDKVKPQLEEKTNETYGKLEAVQYKTQ | 701 |
| 8 | VLAWNQPYWTTYSTNYYIKVRAGDNKYMHLKVFNGPFRWKFHD | |
| | YKADRVLTGYQVDKNKDDELTGF | |
| FcRn-10 | MIPRGLSEAKPATPEIQEIVDKVKPQLEEKTNETYGKLEAVQYKTQ | 702 |
| 9 | VLARPHNRDSHRSTNYYIKVRAGDNKYMHLKVFNGPDRKHRKH | |
| | WHADRVLTGYQVDKNKDDELTGF | |
| FcRn-11 | MIPRGLSEAKPATPEIQEIVDKVKPQLEEKTNETYGKLEAVQYKTQ | 703 |
| 0 | VLAGHPRHHWKYSTNYYIKVRAGDNKYMHLKVFNGPATYKYRV | |
| | DYADRVLTGYQVDKNKDDELTGF | |
| FcRn-11 | MIPRGLSEAKPATPEIQEIVDKVKPQLEEKTNETYGKLEAVQYKTQ | 704 |
| 1 | VLAYPGHHHARDSTNYYIKVRAGDNKYMHLKVFNGPYFYHHHW | |
| | FKADRVLTGYQVDKNKDDELTGF | |
| FcRn-11 | MIPRGLSEAKPATPEIQEIVDKVKPQLEEKTNETYGKLEAVQYKTQ | 705 |
| 2 | VLAIAKHHTWHQSTNYYIKVRAGDNKYMHLKVFNGPYRNHRHHI | |
| | VADRVLTGYQVDKNKDDELTGF | |
| FcRn-11 | MIPRGLSEAKPATPEIQEIVDKVKPQLEEKTNETYGKLEAVQYKTQ | 706 |
| 3 | VLAHNHGHWHFRSTNYYIKVRAGDNKYMHLKVFNGPVQHARHK | |
| | HYADRVLTGYQVDKNKDDELTGF | |
| FcRn-11 | MIPRGLSEAKPATPEIQEIVDKVKPQLEEKTNETYGKLEAVQYKTQ | 707 |
| 4 | VLAKKFDHYHQKSTNYYIKVRAGDNKYMHLKVFNGPKDRHHHN | |
| | RADRVLTGYQVDKNKDDELTGF | |
| FcRn-11 | MIPRGLSEAKPATPEIQEIVDKVKPQLEEKTNETYGKLEAVQYKTQ | 708 |
| 5 | VLASKAHRVEHKSTNYYIKVRAGDNKYMHLKVFNGPKQHHLYHF | |
| | KADRVLTGYQVDKNKDDELTGF | |
| FcRn-11 | MIPRGLSEAKPATPEIQEIVDKVKPQLEEKTNETYGKLEAVQYKTQ | 709 |
| 6 | VLAPKKHYHHGISTNYYIKVRAGDNKYMHLKVFNGPVNSFQAHR | |
| | KADRVLTGYQVDKNKDDELTGF | |
| FcRn-11 | MIPRGLSEAKPATPEIQEIVDKVKPQLEEKTNETYGKLEAVQYKTQ | 710 |
| 7 | VLANSHRIQHGFSTNYYIKVRAGDNKYMHLKVFNGPSHHLHRSAH | |
| | ADRVLTGYQVDKNKDDELTGF | |
| FcRn-11 | MIPRGLSEAKPATPEIQEIVDKVKPQLEEKTNETYGKLEAVQYKTQ | 711 |
| 8 | VLAPHHSHHRLESTNYYIKVRAGDNKYMHLKVFNGPQPTFRHHY | |
| | T ADRVLTGYQVDKNKDDELTGF | |
| FcRn-11 | MIPRGLSEAKPATPEIQEIVDKVKPQLEEKTNETYGKLEAVQYKTQ | 712 |
| 9 | VLAHVHHHREKGSTNYYIKVRAGDNKYMHLKVFNGPYSNSRERQ | |
| | WADRVLTGYQVDKNKDDELTGF | |
| FcRn-12 | MIPRGLSEAKPATPEIQEIVDKVKPQLEEKTNETYGKLEAVQYKTQ | 713 |
| 0 | VLAKHKYHHTGHSTNYYIKVRAGDNKYMHLKVFNGPGQIHKVRS | |
| | TADRVLTGYQVDKNKDDELTGF | |
| FcRn-12 | MIPRGLSEAKPATPEIQEIVDKVKPQLEEKTNETYGKLEAVQYKTQ | 714 |
| 1 | VLAKYFAPHAPHSTNYYIKVRAGDNKYMHLKVFNGPHYHHRHQH | |
| | SADRVLTGYQVDKNKDDELTGF | |
| FcRn-12 | MIPRGLSEAKPATPEIQEIVDKVKPQLEEKTNETYGKLEAVQYKTQ | 715 |
| 2 | VLALHHRAHKHLSTNYYIKVRAGDNKYMHLKVFNGPYFHREHEH | |
| | QADRVLTGYQVDKNKDDELTGF | |
| FcRn-12 | MIPRGLSEAKPATPEIQEIVDKVKPQLEEKTNETYGKLEAVQYKTQ | 716 |
| 3 | VLAAHHGHYGRASTNYYIKVRAGDNKYMHLKVFNGPWHYHHSQ | |
| | WRADRVLTGYQVDKNKDDELTGF | |
| FcRn-12 | MIPRGLSEAKPATPEIQEIVDKVKPQLEEKTNETYGKLEAVQYKTQ | 717 |
| 4 | VLAPEHYSLFKPSTNYYIKVRAGDNKYMHLKVFNGPKHHRKHRH | |
| | WADRVLTGYQVDKNKDDELTGF | |
| FcRn-12 | MIPRGLSEAKPATPEIQEIVDKVKPQLEEKTNETYGKLEAVQYKTQ | 718 |
| 5 | VLADHRPRHPKHSTNYYIKVRAGDNKYMHLKVFNGPAHKHHLGF | |
| | KADRVLTGYQVDKNKDDELTGF | |
| FcRn-12 | MIPRGLSEAKPATPEIQEIVDKVKPQLEEKTNETYGKLEAVQYKTQ | 719 |
| 6 | VLAKHEVHHHGNSTNYYIKVRAGDNKYMHLKVFNGPWHRHGSG | |
| | FRADRVLTGYQVDKNKDDELTGF | |
| FcRn-12 | MIPRGLSEAKPATPEIQEIVDKVKPQLEEKTNETYGKLEAVQYKTQ | 720 |
| 7 | VLAKSHHHKHRESTNYYIKVRAGDNKYMHLKVFNGPVDRFLHVK | |
| | KADRVLTGYQVDKNKDDELTGF | |
| FcRn-12 | MIPRGLSEAKPATPEIQEIVDKVKPQLEEKTNETYGKLEAVQYKTQ | 721 |
| 8 | VLAHRHHTHKWTSTNYYIKVRAGDNKYMHLKVFNGPWPHSIDYR | |
| | QADRVLTGYQVDKNKDDELTGF | |
| FcRn-12 | MIPRGLSEAKPATPEIQEIVDKVKPQLEEKTNETYGKLEAVQYKTQ | 722 |
| 9 | VLAGKHPHHHQNSTNYYIKVRAGDNKYMHLKVFNGPKGRYSHH | |
| | HGADRVLTGYQVDKNKDDELTGF | |
| FcRn-13 | MIPRGLSEAKPATPEIQEIVDKVKPQLEEKTNETYGKLEAVQYKTQ | 723 |
| 0 | VLAWHKHHLRYRSTNYYIKVRAGDNKYMHLKVFNGPYPQDKHK | |
| | VLADRVLTGYQVDKNKDDELTGF | |
| FcRn-13 | MIPRGLSEAKPATPEIQEIVDKVKPQLEEKTNETYGKLEAVQYKTQ | 724 |
| 1 | VLAKTHKEYHHSSTNYYIKVRAGDNKYMHLKVFNGPGYRRHQGR | |
| | GADRVLTGYQVDKNKDDELTGF | |
| FcRn-13 | MIPRGLSEAKPATPEIQEIVDKVKPQLEEKTNETYGKLEAVQYKTQ | 725 |
| 2 | VLARRHHHQHWSSTNYYIKVRAGDNKYMHLKVFNGPALHDTLHP | |
| | SADRVLTGYQVDKNKDDELTGF | |
| FcRn-13 | MIPRGLSEAKPATPEIQEIVDKVKPQLEEKTNETYGKLEAVQYKTQ | 726 |
| 3 | VLATHRWHQGSRSTNYYIKVRAGDNKYMHLKVFNGPKKPHNHR | |
| | YYADRVLTGYQVDKNKDDELTGF | |
| FcRn-13 | MIPRGLSEAKPATPEIQEIVDKVKPQLEEKTNETYGKLEAVQYKTQ | 727 |
| 4 | VLAKRGHHHPNHSTNYYIKVRAGDNKYMHLKVFNGPAKHHWDT | |
| | WSADRVLTGYQVDKNKDDELTGF | |
| FcRn-13 | MIPRGLSEAKPATPEIQEIVDKVKPQLEEKTNETYGKLEAVQYKTQ | 728 |
| 5 | VLAHTVPLRKHQSTNYYIKVRAGDNKYMHLKVFNGPVIHHKHRH | |
| | QADRVLTGYQVDKNKDDELTGF | |
| FcRn-13 | MIPRGLSEAKPATPEIQEIVDKVKPQLEEKTNETYGKLEAVQYKTQ | 729 |
| 6 | VLATYRWGHHFHSTNYYIKVRAGDNKYMHLKVFNGPKYEQIDR | |
| | WHADRVLTGYQVDKNKDDELTGF | |
| FcRn-13 | MIPRGLSEAKPATPEIQEIVDKVKPQLEEKTNETYGKLEAVQYKTQ | 730 |
| 7 | VLAFKHHDRGTHSTNYYIKVRAGDNKYMHLKVFNGPYRKRHTW | |
| | FQADRVLTGYQVDKNKDDELTGF | |
| FcRn-13 | MIPRGLSEAKPATPEIQEIVDKVKPQLEEKTNETYGKLEAVQYKTQ | 731 |
| 8 | VLATAKKHPKSHSTNYYIKVRAGDNKYMHLKVFNGPKVNWHHY | |
| | RHADRVLTGYQVDKNKDDELTGF | |
| FcRn-13 | MIPRGLSEAKPATPEIQEIVDKVKPQLEEKTNETYGKLEAVQYKTQ | 732 |
| 9 | VLAHYHFSKHHNSTNYYIKVRAGDNKYMHLKVFNGPSYHHKHFV | |
| | KADRVLTGYQVDKNKDDELTGF | |
| FcRn-14 | MIPRGLSEAKPATPEIQEIVDKVKPQLEEKTNETYGKLEAVQYKTQ | 733 |
| 0 | VLAYKHKHGKWRSTNYYIKVRAGDNKYMHLKVFNGPWHGHFSK | |
| | GGVAYADRVLTGYQVDKNKDDELTGF | |
| FcRn-14 | MIPRGLSEAKPATPEIQEIVDKVKPQLEEKTNETYGKLEAVQYKTQ | 734 |
| 1 | VLAVHHKPHKTESTNYYIKVRAGDNKYMHLKVFNGPATHLKHHN | |
| | KADRVLTGYQVDKNKDDELTGF | |
| FcRn-14 | MIPRGLSEAKPATPEIQEIVDKVKPQLEEKTNETYGKLEAVQYKTQ | 735 |
| 2 | VLAHGQRYHNKSSTNYYIKVRAGDNKYMHLKVFNGPKRKWEHS | |
| | HKADRVLTGYQVDKNKDDELTGF | |
| FcRn-14 | MIPRGLSEAKPATPEIQEIVDKVKPQLEEKTNETYGKLEAVQYKTQ | 736 |
| 3 | VLAHKHHRHVPSSTNYYIKVRAGDNKYMHLKVFNGPDHRHRHW | |
| | YLADRVLTGYQVDKNKDDELTGF | |
| FcRn-14 | MIPRGLSEAKPATPEIQEIVDKVKPQLEEKTNETYGKLEAVQYKTQ | 737 |
| 4 | VLAHRKHSWSRHSTNYYIKVRAGDNKYMHLKVFNGPTKHSHSQL | |
| | FADRVLTGYQVDKNKDDELTGF | |
| FcRn-14 | MIPRGLSEAKPATPEIQEIVDKVKPQLEEKTNETYGKLEAVQYKTQ | 738 |
| 5 | VLANRHYHQEYKSTNYYIKVRAGDNKYMHLKVFNGPVHKSKHW | |
| | FYADRVLTGYQVDKNKDDELTGF | |
| FcRn-14 | MIPRGLSEAKPATPEIQEIVDKVKPQLEEKTNETYGKLEAVQYKTQ | 739 |
| 6 | VLAKIKHHHSFKSTNYYIKVRAGDNKYMHLKVFNGPSQDHHFHR | |
| | KADRVLTGYQVDKNKDDELTGF | |
| FcRn-14 | MIPRGLSEAKPATPEIQEIVDKVKPQLEEKTNETYGKLEAVQYKTQ | 740 |
| 7 | VLAQHKRSHRQSSTNYYIKVRAGDNKYMHLKVFNGPGHKYSHWS | |
| | KADRVLTGYQVDKNKDDELTGF | |
| FcRn-14 | MIPRGLSEAKPATPEIQEIVDKVKPQLEEKTNETYGKLEAVQYKTQ | 741 |
| 8 | VLASVYKWKASTNYYIKVRAGDNKYMHLKVFNGPNKHHHHAHH | |
| | ADRVLTGYQVDKNKDDELTGF | |
| FcRn-14 | MIPRGLSEAKPATPEIQEIVDKVKPQLEEKTNETYGKLEAVQYKTQ | 742 |
| 9 | VLARKLERTKYHSTNYYIKVRAGDNKYMHLKVFNGPHNKYHPHN | |
| | KADRVLTGYQVDKNKDDELTGF | |
| FcRn-15 | MIPRGLSEAKPATPEIQEIVDKVKPQLEEKTNETYGKLEAVQYKTQ | 743 |
| 0 | VLATGHKHQFHQSTNYYIKVRAGDNKYMHLKVFNGPKHKHGWF | |
| | HSADRVLTGYQVDKNKDDELTGF | |
| FcRn-15 | MIPRGLSEAKPATPEIQEIVDKVKPQLEEKTNETYGKLEAVQYKTQ | 744 |
| 1 | VLAWQELGHRVYSTNYYIKVRAGDNKYMHLKVFNGPYRRHHDK | |
| | KHADRVLTGYQVDKNKDDELTGF | |
| FcRn-15 | MIPRGLSEAKPATPEIQEIVDKVKPQLEEKTNETYGKLEAVQYKTQ | 745 |
| 2 | VLAHPHHTDQRHSTNYYIKVRAGDNKYMHLKVFNGPEGHRQHA | |
| | KFADRVLTGYQVDKNKDDELTGF | |
| FcRn-15 | MIPRGLSEAKPATPEIQEIVDKVKPQLEEKTNETYGKLEAVQYKTQ | 746 |
| 3 | VLAFHNHGHPHLSTNYYIKVRAGDNKYMHLKVFNGPNSRGHHHH | |
| | KADRVLTGYQVDKNKDDELTGF | |
| FcRn-15 | MIPRGLSEAKPATPEIQEIVDKVKPQLEEKTNETYGKLEAVQYKTQ | 747 |
| 4 | VLAWNHHHRNKQSTNYYIKVRAGDNKYMHLKVFNGPPHKRPHL | |
| | YHADRVLTGYQVDKNKDDELTGF | |
| FcRn-15 | MIPRGLSEAKPATPEIQEIVDKVKPQLEEKTNETYGKLEAVQYKTQ | 748 |
| 5 | VLATRHGHRHYRSTNYYIKVRAGDNKYMHLKVFNGPFYDLHPKL | |
| | SADRVLTGYQVDKNKDDELTGF | |
| FcRn-15 | MIPRGLSEAKPATPEIQEIVDKVKPQLEEKTNETYGKLEAVQYKTQ | 749 |
| 6 | VLAPHHRWHRQHSTNYYIKVRAGDNKYMHLKVFNGPIHQHSQKK | |
| | SADRVLTGYQVDKNKDDELTGF | |
| FcRn-15 | MIPRGLSEAKPATPEIQEIVDKVKPQLEEKTNETYGKLEAVQYKTQ | 750 |
| 7 | VLANLRHQTEHRSTNYYIKVRAGDNKYMHLKVFNGPKRHHRHSH | |
| | VADRVLTGYQVDKNKDDELTGF | |
| FcRn-15 | MIPRGLSEAKPATPEIQEIVDKVKPQLEEKTNETYGKLEAVQYKTQ | 751 |
| 8 | VLAGHRKHTHLLSTNYYIKVRAGDNKYMHLKVFNGPKKSHKAW | |
| | AWADRVLTGYQVDKNKDDELTGF | |
| FcRn-15 | MIPRGLSEAKPATPEIQEIVDKVKPQLEEKTNETYGKLEAVQYKTQ | 752 |
| 9 | VLARHSKPQHWPSTNYYIKVRAGDNKYMHLKVFNGPKGHKQHH | |
| | HYADRVLTGYQVDKNKDDELTGF | |
| FcRn-16 | MIPRGLSEAKPATPEIQEIVDKVKPQLEEKTNETYGKLEAVQYKTQ | 753 |
| 0 | VLAPHRSRFHKQSTNYYIKVRAGDNKYMHLKVFNGPWKAERHKH | |
| | YADRVLTGYQVDKNKDDELTGF | |
| FcRn-16 | MIPRGLSEAKPATPEIQEIVDKVKPQLEEKTNETYGKLEAVQYKTQ | 754 |
| 1 | VLAQRKHFHWDHSTNYYIKVRAGDNKYMHLKVFNGPQHRYTHH | |
| | HTADRVLTGYQVDKNKDDELTGF | |
| FcRn-16 | MIPRGLSEAKPATPEIQEIVDKVKPQLEEKTNETYGKLEAVQYKTQ | 755 |
| 2 | VLANKHHGQQHNSTNYYIKVRAGDNKYMHLKVFNGPSHKVHTH | |
| | SKADRVLTGYQVDKNKDDELTGF | |
| FcRn-16 | MIPRGLSEAKPATPEIQEIVDKVKPQLEEKTNETYGKLEAVQYKTQ | 756 |
| 3 | VLAKYHHKYKSYSTNYYIKVRAGDNKYMHLKVFNGPKHLDQYH | |
| | PSADRVLTGYQVDKNKDDELTGF | |
| FcRn-16 | MIPRGLSEAKPATPEIQEIVDKVKPQLEEKTNETYGKLEAVQYKTQ | 757 |
| 4 | VLAREWHHQTYYSTNYYIKVRAGDNKYMHLKVFNGPSAHKHHH | |
| | NHADRVLTGYQVDKNKDDELTGF | |
| FcRn-16 | MIPRGLSEAKPATPEIQEIVDKVKPQLEEKTNETYGKLEAVQYKTQ | 758 |
| 5 | VLARHYHDHHYRSTNYYIKVRAGDNKYMHLKVFNGPKYKHQVK | |
| | QHADRVLTGYQVDKNKDDELTGF | |
| FcRn-16 | MIPRGLSEAKPATPEIQEIVDKVKPQLEEKTNETYGKLEAVQYKTQ | 759 |
| 6 | VLASHTYRHSTGSTNYYIKVRAGDNKYMHLKVFNGPISHRHRHDI | |
| | ADRVLTGYQVDKNKDDELTGF | |
| FcRn-16 | MIPRGLSEAKPATPEIQEIVDKVKPQLEEKTNETYGKLEAVQYKTQ | 760 |
| 7 | VLANHRHHHPHFSTNYYIKVRAGDNKYMHLKVFNGPNYHAHRSF | |
| | YADRVLTGYQVDKNKDDELTGF | |
| FcRn-16 | MIPRGLSEAKPATPEIQEIVDKVKPQLEEKTNETYGKLEAVQYKTQ | 761 |
| 8 | VLAHAKTRHHEHSTNYYIKVRAGDNKYMHLKVFNGPWFKHHFW | |
| | HRADRVLTGYQVDKNKDDELTGF | |
| FcRn-16 | MIPRGLSEAKPATPEIQEIVDKVKPQLEEKTNETYGKLEAVQYKTQ | 762 |
| 9 | VLAEPHQKHKRHSTNYYIKVRAGDNKYMHLKVFNGPKRKGDFLN | |
| | YADRVLTGYQVDKNKDDELTGF | |
| FcRn-17 | MIPRGLSEAKPATPEIQEIVDKVKPQLEEKTNETYGKLEAVQYKTQ | 763 |
| 0 | VLADRRHQHGRHSTNYYIKVRAGDNKYMHLKVFNGPHKPWGHH | |
| | KLADRVLTGYQVDKNKDDELTGF | |
| FcRn-17 | MIPRGLSEAKPATPEIQEIVDKVKPQLEEKTNETYGKLEAVQYKTQ | 764 |
| 1 | VLAHQHRHNLQQSTNYYIKVRAGDNKYMHLKVFNGPQYKHKHW | |
| | LWADRVLTGYQVDKNKDDELTGF | |
| FcRn-17 | MIPRGLSEAKPATPEIQEIVDKVKPQLEEKTNETYGKLEAVQYKTQ | 765 |
| 2 | VLAKRIHTWHTDSTNYYIKVRAGDNKYMHLKVFNGPFKRHHSWH | |
| | HADRVLTGYQVDKNKDDELTGF | |
| FcRn-17 | MIPRGLSEAKPATPEIQEIVDKVKPQLEEKTNETYGKLEAVQYKTQ | 766 |
| 3 | VLAYHHQPRYQQSTNYYIKVRAGDNKYMHLKVFNGPKDRHHEFR | |
| | HADRVLTGYQVDKNKDDELTGF | |
| FcRn-17 | MIPRGLSEAKPATPEIQEIVDKVKPQLEEKTNETYGKLEAVQYKTQ | 767 |
| 4 | VLAGIGRHRRRRSTNYYIKVRAGDNKYMHLKVFNGPHHHHFHNH | |
| | RADRVLTGYQVDKNKDDELTGF | |
| FcRn-17 | MIPRGLSEAKPATPEIQEIVDKVKPQLEEKTNETYGKLEAVQYKTQ | 768 |
| 5 | VLADQHKQHYHFSTNYYIKVRAGDNKYMHLKVFNGPSVNQHFK | |
| | HKADRVLTGYQVDKNKDDELTGF | |
| FcRn-17 | MIPRGLSEAKPATPEIQEIVDKVKPQLEEKTNETYGKLEAVQYKTQ | 769 |
| 6 | VLAGRHHESHKSSTNYYIKVRAGDNKYMHLKVFNGPFQHKLHKH | |
| | HADRVLTGYQVDKNKDDELTGF | |
| FcRn-17 | MIPRGLSEAKPATPEIQEIVDKVKPQLEEKTNETYGKLEAVQYKTQ | 770 |
| 7 | VLAKRHHHWHYSSTNYYIKVRAGDNKYMHLKVFNGPDTRYDKW | |
| | HGADRVLTGYQVDKNKDDELTGF | |
| FcRn-17 | MIPRGLSEAKPATPEIQEIVDKVKPQLEEKTNETYGKLEAVQYKTQ | 771 |
| 8 | VLANRKGGHRYHSTNYYIKVRAGDNKYMHLKVFNGPHVHRVQH | |
| | SKADRVLTGYQVDKNKDDELTGF | |
| FcRn-17 | MIPRGLSEAKPATPEIQEIVDKVKPQLEEKTNETYGKLEAVQYKTQ | 772 |
| 9 | VLARKWHGHWHRSTNYYIKVRAGDNKYMHLKVFNGPWNYQFK | |
| | SASADRVLTGYQVDKNKDDELTGF | |
| FcRn-18 | MIPRGLSEAKPATPEIQEIVDKVKPQLEEKTNETYGKLEAVQYKTQ | 773 |
| 0 | VLANWKRHHYHRSTNYYIKVRAGDNKYMHLKVFNGPQWWFHK | |
| | HVKADRVLTGYQVDKNKDDELTGF | |
| FcRn-18 | MIPRGLSEAKPATPEIQEIVDKVKPQLEEKTNETYGKLEAVQYKTQ | 774 |
| 1 | VLATRHHHRNRFSTNYYIKVRAGDNKYMHLKVFNGPISHNPNHY | |
| | HADRVLTGYQVDKNKDDELTGF | |
| FcRn-18 | MIPRGLSEAKPATPEIQEIVDKVKPQLEEKTNETYGKLEAVQYKTQ | 775 |
| 2 | VLAVKWDFKHFYSTNYYIKVRAGDNKYMHLKVFNGPTNLHSPDS | |
| | PADRVLTGYQVDKNKDDELTGF | |
| FcRn-18 | MIPRGLSEAKPATPEIQEIVDKVKPQLEEKTNETYGKLEAVQYKTQ | 776 |
| 3 | VLASDDLSPVKWSTNYYIKVRAGDNKYMHLKVFNGPFDKYNSHY | |
| | LADRVLTGYQVDKNKDDELTGF | |
| FcRn-18 | MIPRGLSEAKPATPEIQEIVDKVKPQLEEKTNETYGKLEAVQYKTQ | 777 |
| 4 | VLARHRQKWPIHSTNYYIKVRAGDNKYMHLKVFNGPSTHQQKHQ | |
| | WADRVLTGYQVDKNKDDELTGF | |
| FcRn-18 | MIPRGLSEAKPATPEIQEIVDKVKPQLEEKTNETYGKLEAVQYKTQ | 778 |
| 5 | VLADRHAYHRHSTNYYIKVRAGDNKYMHLKVFNGPFHEEIKHWQ | |
| | ADRVLTGYQVDKNKDDELTGF | |
| FcRn-18 | MIPRGLSEAKPATPEIQEIVDKVKPQLEEKTNETYGKLEAVQYKTQ | 779 |
| 6 | VLAHRHHQKHAFSTNYYIKVRAGDNKYMHLKVFNGPWRDWNHR | |
| | FPADRVLTGYQVDKNKDDELTGF | |
| FcRn-18 | MIPRGLSEAKPATPEIQEIVDKVKPQLEEKTNETYGKLEAVQYKTQ | 780 |
| 7 | VLAQKGKHHDYRSTNYYIKVRAGDNKYMHLKVFNGPKPHQTKW | |
| | HHADRVLTGYQVDKNKDDELTGF | |
| FcRn-18 | MIPRGLSEAKPATPEIQEIVDKVKPQLEEKTNETYGKLEAVQYKTQ | 781 |
| 8 | VLAWNKHFYKQGSTNYYIKVRAGDNKYMHLKVFNGPRHHRQSH | |
| | HWADRVLTGYQVDKNKDDELTGF | |
| FcRn-18 | MIPRGLSEAKPATPEIQEIVDKVKPQLEEKTNETYGKLEAVQYKTQ | 782 |
| 9 | VLAKRRHNREFVSTNYYIKVRAGDNKYMHLKVFNGPIRHYHADR | |
| | EADRVLTGYQVDKNKDDELTGF | |
| FcRn-19 | MIPRGLSEAKPATPEIQEIVDKVKPQLEEKTNETYGKLEAVQYKTQ | 783 |
| 0 | VLATRHVRHWTHSTNYYIKVRAGDNKYMHLKVFNGPASQVPPKH | |
| | RADRVLTGYQVDKNKDDELTGF | |
| FcRn-19 | MIPRGLSEAKPATPEIQEIVDKVKPQLEEKTNETYGKLEAVQYKTQ | 784 |
| 1 | VLANRKWQQNHHSTNYYIKVRAGDNKYMHLKVFNGPKHKHWH | |
| | HQLADRVLTGYQVDKNKDDELTGF | |
| FcRn-19 | MIPRGLSEAKPATPEIQEIVDKVKPQLEEKTNETYGKLEAVQYKTQ | 785 |
| 2 | VLARHREKHQPYSTNYYIKVRAGDNKYMHLKVFNGPWEHHRTR | |
| | WQADRVLTGYQVDKNKDDELTGF | |
| FcRn-19 | MIPRGLSEAKPATPEIQEIVDKVKPQLEEKTNETYGKLEAVQYKTQ | 786 |
| 3 | VLA YHKHNS KHS STN YYIKVRAGDNKYMHLKVFNGPFKTFKEWH | |
| | VADRVLTGYQVDKNKDDELTGF | |
| FcRn-19 | MIPRGLSEAKPATPEIQEIVDKVKPQLEEKTNETYGKLEAVQYKTQ | 787 |
| 4 | VLAPAGQHKRKHSTNYYIKVRAGDNKYMHLKVFNGPKGHRWHD | |
| | FKADRVLTGYQVDKNKDDELTGF | |
| FcRn-19 | MIPRGLSEAKPATPEIQEIVDKVKPQLEEKTNETYGKLEAVQYKTQ | 788 |
| 5 | VLADRHKYPVRVSTNYYIKVRAGDNKYMHLKVFNGPKHAWQHH | |
| | KSADRVLTGYQVDKNKDDELTGF | |
| FcRn-19 | MIPRGLSEAKPATPEIQEIVDKVKPQLEEKTNETYGKLEAVQYKTQ | 789 |
| 6 | VLAGNNNPQGHVSTNYYIKVRAGDNKYMHLKVFNGPYKHFKHH | |
| | WRADRVLTGYQVDKNKDDELTGF | |
| FcRn-19 | MIPRGLSEAKPATPEIQEIVDKVKPQLEEKTNETYGKLEAVQYKTQ | 790 |
| 7 | VLAKQLHHHHYKSTNYYIKVRAGDNKYMHLKVFNGPAHRKFFQ | |
| | WHADRVLTGYQVDKNKDDELTGF | |
| FcRn-19 | MIPRGLSEAKPATPEIQEIVDKVKPQLEEKTNETYGKLEAVQYKTQ | 791 |
| 8 | VLAQKHNWHRWHSTNYYIKVRAGDNKYMHLKVFNGPWTHRSQ | |
| | VKVADRVLTGYQVDKNKDDELTGF | |
| FcRn-19 | MIPRGLSEAKPATPEIQEIVDKVKPQLEEKTNETYGKLEAVQYKTQ | 792 |
| 9 | VLAYKHLGYWQKSTNYYIKVRAGDNKYMHLKVFNGPFQWFKVG | |
| | VPADRVLTGYQVDKNKDDELTGF | |
| FcRn-20 | MIPRGLSEAKPATPEIQEIVDKVKPQLEEKTNETYGKLEAVQYKTQ | 793 |
| 0 | VLAHQKNFEAWESTNYYIKVRAGDNKYMHLKVFNGPVRYYSKY | |
| | QWADRVLTGYQVDKNKDDELTGF | |
| FcRn-20 | MIPRGLSEAKPATPEIQEIVDKVKPQLEEKTNETYGKLEAVQYKTQ | 794 |
| 1 | VLAERVRRRHPPSTNYYIKVRAGDNKYMHLKVFNGPNGWHVGH | |
| | HIADRVLTGYQVDKNKDDELTGF | |
| FcRn-20 | MIPRGLSEAKPATPEIQEIVDKVKPQLEEKTNETYGKLEAVQYKTQ | 795 |
| 2 | VLAHKVHIFREPSTNYYIKVRAGDNKYMHLKVFNGPTRFRHYLVT | |
| | ADRVLTGYQVDKNKDDELTGF | |
| FcRn-20 | MIPRGLSEAKPATPEIQEIVDKVKPQLEEKTNETYGKLEAVQYKTQ | 796 |
| 3 | VLAVKSFHVHSHSTNYYIKVRAGDNKYMHLKVFNGPSWRNVRPE | |
| | F ADRVLTGYQVDKNKDDELTGF | |
| FcRn-20 | MIPRGLSEAKPATPEIQEIVDKVKPQLEEKTNETYGKLEAVQYKTQ | 797 |
| 4 | VLAWHKDPPPPWSTNYYIKVRAGDNKYMHLKVFNGPFGHTFSWR | |
| | YADRVLTGYQVDKNKDDELTGF | |
| FcRn-20 | MIPRGLSEAKPATPEIQEIVDKVKPQLEEKTNETYGKLEAVQYKTQ | 798 |
| 5 | VLAHRYAHNHFLSTNYYIKVRAGDNKYMHLKVFNGPFKHQKFYR | |
| | D ADRVLTGYQVDKNKDDELTGF | |
| FcRn-20 | MIPRGLSEAKPATPEIQEIVDKVKPQLEEKTNETYGKLEAVQYKTQ | 799 |
| 6 | VLAVSHALKTHTSTNYYIKVRAGDNKYMHLKVFNGPWRNKWRA | |
| | QDADRVLTGYQVDKNKDDELTGF | |
| FcRn-20 | MIPRGLSEAKPATPEIQEIVDKVKPQLEEKTNETYGKLEAVQYKTQ | 800 |
| 7 | VLAHQSRAIYVYSTNYYIKVRAGDNKYMHLKVFNGPYQKSYFHR | |
| | HADRVLTGYQVDKNKDDELTGF | |
| FcRn-20 | MIPRGLSEAKPATPEIQEIVDKVKPQLEEKTNETYGKLEAVQYKTQ | 801 |
| 8 | VLAHHTTYHQHHSTNYYIKVRAGDNKYMHLKVFNGPWRPRPVH | |
| | WKADRVLTGYQVDKNKDDELTGF | |
| FcRn-20 | MIPRGLSEAKPATPEIQEIVDKVKPQLEEKTNETYGKLEAVQYKTQ | 802 |
| 9 | VLATWWRNVQHHSTNYYIKVRAGDNKYMHLKVFNGPDPQYKRH | |
| | GYADRVLTGYQVDKNKDDELTGF | |
| FcRn-21 | MIPRGLSEAKPATPEIQEIVDKVKPQLEEKTNETYGKLEAVQYKTQ | 803 |
| 0 | VLAWNKHNYQHQSTNYYIKVRAGDNKYMHLKVFNGPVPHSVVH | |
| | YKADRVLTGYQVDKNKDDELTGF | |
| FcRn-21 | MIPRGLSEAKPATPEIQEIVDKVKPQLEEKTNETYGKLEAVQYKTQ | 804 |
| 1 | VLAQHTLRVHTVSTNYYIKVRAGDNKYMHLKVFNGPAYSQSFIHH | |
| | ADRVLTGYQVDKNKDDELTGF | |
| FcRn-21 | MIPRGLSEAKPATPEIQEIVDKVKPQLEEKTNETYGKLEAVQYKTQ | 805 |
| 2 | VLANQHFHQAGHSTNYYIKVRAGDNKYMHLKVFNGPFSHSTWRY | |
| | HADRVLTGYQVDKNKDDELTGF | |
| FcRn-21 | MIPRGLSEAKPATPEIQEIVDKVKPQLEEKTNETYGKLEAVQYKTQ | 806 |
| 3 | VLARQWTDRVWVSTNYYIKVRAGDNKYMHLKVFNGPSKKHQQH | |
| | W ADRVLTGYQVDKNKDDELTGF | |
| FcRn-21 | MIPRGLSEAKPATPEIQEIVDKVKPQLEEKTNETYGKLEAVQYKTQ | 807 |
| 4 | VLADHDYFHHNKSTNYYIKVRAGDNKYMHLKVFNGPAKHPRIHV | |
| | T ADRVLTGYQVDKNKDDELTGF | |
| FcRn-21 | MIPRGLSEAKPATPEIQEIVDKVKPQLEEKTNETYGKLEAVQYKTQ | 808 |
| 5 | VLAYWDVGPGFNSTNYYIKVRAGDNKYMHLKVFNGPSPWHHPT | |
| | HFADRVLTGYQVDKNKDDELTGF | |
| FcRn-21 | MIPRGLSEAKPATPEIQEIVDKVKPQLEEKTNETYGKLEAVQYKTQ | 809 |
| 6 | VLAGIHGHHEYYSTNYYIKVRAGDNKYMHLKVFNGPSNWFHHKH | |
| | RADRVLTGYQVDKNKDDELTGF | |
| FcRn-21 | MIPRGLSEAKPATPEIQEIVDKVKPQLEEKTNETYGKLEAVQYKTQ | 810 |
| 7 | VLAWQRSRYGKYSTNYYIKVRAGDNKYMHLKVFNGPAYWPYQK | |
| | PTADRVLTGYQVDKNKDDELTGF | |
| FcRn-21 | MIPRGLSEAKPATPEIQEIVDKVKPQLEEKTNETYGKLEAVQYKTQ | 811 |
| 8 | VLAYHQQHWRVHSTNYYIKVRAGDNKYMHLKVFNGPILVGYNW | |
| | HY ADRVLTGYQVDKNKDDELTGF | |
| FcRn-21 | MIPRGLSEAKPATPEIQEIVDKVKPQLEEKTNETYGKLEAVQYKTQ | 812 |
| 9 | VLAATRNSYPRHSTNYYIKVRAGDNKYMHLKVFNGPVHSHLPRH | |
| | PADRVLTGYQVDKNKDDELTGF | |
| FcRn-22 | MIPRGLSEAKPATPEIQEIVDKVKPQLEEKTNETYGKLEAVQYKTQ | 813 |
| 0 | VLAEHHHAHWATSTNYYIKVRAGDNKYMHLKVFNGPLFLHGVHI | |
| | FADRVLTGYQVDKNKDDELTGF | |
| FcRn-22 | MIPRGLSEAKPATPEIQEIVDKVKPQLEEKTNETYGKLEAVQYKTQ | 814 |
| 1 | VLAKQHQRSFIISTNYYIKVRAGDNKYMHLKVFNGPTSLPSEWFQ | |
| | ADRVLTGYQVDKNKDDELTGF | |
| FcRn-22 | MIPRGLSEAKPATPEIQEIVDKVKPQLEEKTNETYGKLEAVQYKTQ | 815 |
| 2 | VLAQFWGHRVEHSTNYYIKVRAGDNKYMHLKVFNGPTRHYHQR | |
| | NRADRVLTGYQVDKNKDDELTGF | |
| FcRn-22 | MIPRGLSEAKPATPEIQEIVDKVKPQLEEKTNETYGKLEAVQYKTQ | 816 |
| 3 | VLAFPSSHRTSYSTNYYIKVRAGDNKYMHLKVFNGPYSAHHIRWH | |
| | ADRVLTGYQVDKNKDDELTGF | |
| FcRn-22 | MIPRGLSEAKPATPEIQEIVDKVKPQLEEKTNETYGKLEAVQYKTQ | 817 |
| 4 | VLASSKYIDHRQSTNYYIKVRAGDNKYMHLKVFNGPERAQHHTH | |
| | PADRVLTGYQVDKNKDDELTGF | |
| FcRn-22 | MIPRGLSEAKPATPEIQEIVDKVKPQLEEKTNETYGKLEAVQYKTQ | 818 |
| 5 | VLAYWRHEHSSPSTNYYIKVRAGDNKYMHLKVFNGPWKKHHYG | |
| | HY ADRVLTGYQVDKNKDDELTGF | |
| FcRn-22 | MIPRGLSEAKPATPEIQEIVDKVKPQLEEKTNETYGKLEAVQYKTQ | 819 |
| 6 | VLAERAHYDHHYSTNYYIKVRAGDNKYMHLKVFNGPSHHAHHS | |
| | VQADRVLTGYQVDKNKDDELTGF | |
| FcRn-22 | MIPRGLSEAKPATPEIQEIVDKVKPQLEEKTNETYGKLEAVQYKTQ | 820 |
| 7 | VLAWRHKAYIYGSTNYYIKVRAGDNKYMHLKVFNGPWKHWEHK | |
| | PQADRVLTGYQVDKNKDDELTGF | |
| FcRn-22 | MIPRGLSEAKPATPEIQEIVDKVKPQLEEKTNETYGKLEAVQYKTQ | 821 |
| 8 | VLAPQIKEQYNGSTNYYIKVRAGDNKYMHLKVFNGPAQVPVLLW | |
| | YADRVLTGYQVDKNKDDELTGF | |
| FcRn-22 | MIPRGLSEAKPATPEIQEIVDKVKPQLEEKTNETYGKLEAVQYKTQ | 822 |
| 9 | VLAFKKVARDHWSTNYYIKVRAGDNKYMHLKVFNGPWVHFYPW | |
| | QQADRVLTGYQVDKNKDDELTGF | |
| FcRn-23 | MIPRGLSEAKPATPEIQEIVDKVKPQLEEKTNETYGKLEAVQYKTQ | 823 |
| 0 | VLAAQKHHWHKTSTNYYIKVRAGDNKYMHLKVFNGPWHLAHVF | |
| | YTADRVLTGYQVDKNKDDELTGF | |
| FcRn-23 | MIPRGLSEAKPATPEIQEIVDKVKPQLEEKTNETYGKLEAVQYKTQ | 824 |
| 1 | VLAVSQGHHSWDSTNYYIKVRAGDNKYMHLKVFNGPSSHHHKN | |
| | HHADRVLTGYQVDKNKDDELTGF | |
| FcRn-23 | MIPRGLSEAKPATPEIQEIVDKVKPQLEEKTNETYGKLEAVQYKTQ | 825 |
| 2 | VLAWHLRGHPHYSTNYYIKVRAGDNKYMHLKVFNGPTKQPHGV | |
| | HYADRVLTGYQVDKNKDDELTGF | |
| FcRn-23 | MIPRGLSEAKPATPEIQEIVDKVKPQLEEKTNETYGKLEAVQYKTQ | 826 |
| 3 | VLAHSHHHQPWESTNYYIKVRAGDNKYMHLKVFNGPEHRTHHLG | |
| | KADRVLTGYQVDKNKDDELTGF | |
| FcRn-23 | MIPRGLSEAKPATPEIQEIVDKVKPQLEEKTNETYGKLEAVQYKTQ | 827 |
| 4 | VLARRFRVHLHQSTNYYIKVRAGDNKYMHLKVFNGPTNHRQDHP | |
| | EADRVLTGYQVDKNKDDELTGF | |
| FcRn-23 | MIPRGLSEAKPATPEIQEIVDKVKPQLEEKTNETYGKLEAVQYKTQ | 828 |
| 5 | VLAGRQTKSHQHSTNYYIKVRAGDNKYMHLKVFNGPHRKTNWH | |
| | SYADRVLTGYQVDKNKDDELTGF | |
| FcRn-23 | MIPRGLSEAKPATPEIQEIVDKVKPQLEEKTNETYGKLEAVQYKTQ | 829 |
| 6 | VLAPYSRHHHQLSTNYYIKVRAGDNKYMHLKVFNGPSGVHHAAV | |
| | WADRVLTGYQVDKNKDDELTGF | |
| FcRn-23 | MIPRGLSEAKPATPEIQEIVDKVKPQLEEKTNETYGKLEAVQYKTQ | 830 |
| 7 | VLAVHGDHTRAWSTNYYIKVRAGDNKYMHLKVFNGPRYASSYW | |
| | EWADRVLTGYQVDKNKDDELTGF | |
| FcRn-23 | MIPRGLSEAKPATPEIQEIVDKVKPQLEEKTNETYGKLEAVQYKTQ | 831 |
| 8 | VLADWQKRGRSWSTNYYIKVRAGDNKYMHLKVFNGPNQSGVVV | |
| | QVADRVLTGYQVDKNKDDELTGF | |
| FcRn-23 | MIPRGLSEAKPATPEIQEIVDKVKPQLEEKTNETYGKLEAVQYKTQ | 832 |
| 9 | VLAYNWERFRKVSTNYYIKVRAGDNKYMHLKVFNGPYHNHQHTI | |
| | HADRVLTGYQVDKNKDDELTGF | |
| FcRn-24 | MIPRGLSEAKPATPEIQEIVDKVKPQLEEKTNETYGKLEAVQYKTQ | 833 |
| 0 | VLAGWSRNVWFWSTNYYIKVRAGDNKYMHLKVFNGPKQELGTK | |
| | TTADRVLTGYQVDKNKDDELTGF | |
| FcRn-24 | MIPRGLSEAKPATPEIQEIVDKVKPQLEEKTNETYGKLEAVQYKTQ | 834 |
| 1 | VLASQTQHRRHHSTNYYIKVRAGDNKYMHLKVFNGPLVPQHHQH | |
| | QADRVLTGYQVDKNKDDELTGF | |
| FcRn-24 | MIPRGLSEAKPATPEIQEIVDKVKPQLEEKTNETYGKLEAVQYKTQ | 835 |
| 2 | VLAPNVKHKHRWSTNYYIKVRAGDNKYMHLKVFNGPWHDIAGG | |
| | HYADRVLTGYQVDKNKDDELTGF | |
| FcRn-24 | MIPRGLSEAKPATPEIQEIVDKVKPQLEEKTNETYGKLEAVQYKTQ | 836 |
| 3 | VLAKHPAFHQHSSTNYYIKVRAGDNKYMHLKVFNGPRHDLHYHY | |
| | PADRVLTGYQVDKNKDDELTGF | |
| FcRn-24 | MIPRGLSEAKPATPEIQEIVDKVKPQLEEKTNETYGKLEAVQYKTQ | 837 |
| 4 | VLAPHHHTDWRTSTNYYIKVRAGDNKYMHLKVFNGPYWHWKVR | |
| | RFADRVLTGYQVDKNKDDELTGF | |
| FcRn-24 | MIPRGLSEAKPATPEIQEIVDKVKPQLEEKTNETYGKLEAVQYKTQ | 838 |
| 5 | VLAHTHKILHFHSTNYYIKVRAGDNKYMHLKVFNGPDKQRYEDK | |
| | QADRVLTGYQVDKNKDDELTGF | |
| FcRn-24 | MIPRGLSEAKPATPEIQEIVDKVKPQLEEKTNETYGKLEAVQYKTQ | 839 |
| 6 | VLAPNHHFFLQFSTNYYIKVRAGDNKYMHLKVFNGPQHHHPHRH | |
| | PADRVLTGYQVDKNKDDELTGF | |
| FcRn-24 | MIPRGLSEAKPATPEIQEIVDKVKPQLEEKTNETYGKLEAVQYKTQ | 840 |
| 7 | VLARRYIGHNYSSTNYYIKVRAGDNKYMHLKVFNGPWHHFHNSY | |
| | DADRVLTGYQVDKNKDDELTGF | |
| FcRn-24 | MIPRGLSEAKPATPEIQEIVDKVKPQLEEKTNETYGKLEAVQYKTQ | 841 |
| 8 | VLATHYHHQWDPSTNYYIKVRAGDNKYMHLKVFNGPIWYSHRPR | |
| | AADRVLTGYQVDKNKDDELTGF | |
| FcRn-24 | MIPRGLSEAKPATPEIQEIVDKVKPQLEEKTNETYGKLEAVQYKTQ | 842 |
| 9 | VLADKKHGQYKSTNYYIKVRAGDNKYMHLKVFNGPWDDHTLK | |
| | WYADRVLTGYQVDKNKDDELTGF | |
| FcRn-25 | MIPRGLSEAKPATPEIQEIVDKVKPQLEEKTNETYGKLEAVQYKTQ | 843 |
| 0 | VLAYHIQGVYWRSTNYYIKVRAGDNKYMHLKVFNGPIAFWGPKR | |
| | FADRVLTGYQVDKNKDDELTGF | |
| FcRn-25 | MIPRGLSEAKPATPEIQEIVDKVKPQLEEKTNETYGKLEAVQYKTQ | 844 |
| 1 | VLASRFKHHVRNSTNYYIKVRAGDNKYMHLKVFNGPFPHRNKSD | |
| | GADRVLTGYQVDKNKDDELTGF | |
| FcRn-25 | MIPRGLSEAKPATPEIQEIVDKVKPQLEEKTNETYGKLEAVQYKTQ | 845 |
| 2 | VLAWHHQHHLLASTNYYIKVRAGDNKYMHLKVFNGPFKRSQQW | |
| | EWADRVLTGYQVDKNKDDELTGF | |
| FcRn-25 | MIPRGLSEAKPATPEIQEIVDKVKPQLEEKTNETYGKLEAVQYKTQ | 846 |
| 3 | VLAHNKHPSPRVSTNYYIKVRAGDNKYMHLKVFNGPKHRYQPTH | |
| | WADRVLTGYQVDKNKDDELTGF | |
| FcRn-25 | MIPRGLSEAKPATPEIQEIVDKVKPQLEEKTNETYGKLEAVQYKTQ | 847 |
| 4 | VLATWFHQHEQQSTNYYIKVRAGDNKYMHLKVFNGPYHDIWAW | |
| | HVADRVLTGYQVDKNKDDELTGF | |
| FcRn-25 | MIPRGLSEAKPATPEIQEIVDKVKPQLEEKTNETYGKLEAVQYKTQ | 848 |
| 5 | VLAWKEWRYHHQSTNYYIKVRAGDNKYMHLKVFNGPDFVKHHL | |
| | HDADRVLTGYQVDKNKDDELTGF | |
| FcRn-25 | MIPRGLSEAKPATPEIQEIVDKVKPQLEEKTNETYGKLEAVQYKTQ | 849 |
| 6 | VLAFTKHWDRWYSTNYYIKVRAGDNKYMHLKVFNGPISDHVHFG | |
| | WADRVLTGYQVDKNKDDELTGF | |
| FcRn-25 | MIPRGLSEAKPATPEIQEIVDKVKPQLEEKTNETYGKLEAVQYKTQ | 850 |
| 7 | VLATRLYDHSVWSTNYYIKVRAGDNKYMHLKVFNGPYHHRDHW | |
| | GWADRVLTGYQVDKNKDDELTGF | |
| FcRn-25 | MIPRGLSEAKPATPEIQEIVDKVKPQLEEKTNETYGKLEAVQYKTQ | 851 |
| 8 | VLAWEYQTHHPASTNYYIKVRAGDNKYMHLKVFNGPEWFTVGGI | |
| | AADRVLTGYQVDKNKDDELTGF | |
| FcRn-25 | MIPRGLSEAKPATPEIQEIVDKVKPQLEEKTNETYGKLEAVQYKTQ | 852 |
| 9 | VLAVHFRSHRDFSTNYYIKVRAGDNKYMHLKVFNGPERKHAHQH | |
| | PADRVLTGYQVDKNKDDELTGF | |
| FcRn-26 | MIPRGLSEAKPATPEIQEIVDKVKPQLEEKTNETYGKLEAVQYKTQ | 853 |
| 0 | VLASRHTHHHRSSTNYYIKVRAGDNKYMHLKVFNGPDSNLYNEW | |
| | NADRVLTGYQVDKNKDDELTGF | |
| FcRn-26 | MIPRGLSEAKPATPEIQEIVDKVKPQLEEKTNETYGKLEAVQYKTQ | 854 |
| 1 | VLATARYEHAPTSTNYYIKVRAGDNKYMHLKVFNGPTAKHSHKK | |
| | HADRVLTGYQVDKNKDDELTGF | |
| FcRn-26 | MIPRGLSEAKPATPEIQEIVDKVKPQLEEKTNETYGKLEAVQYKTQ | 855 |
| 2 | VLARHRKESWYVSTNYYIKVRAGDNKYMHLKVFNGPNWPHGIDP | |
| | KADRVLTGYQVDKNKDDELTGF | |
| FcRn-26 | MIPRGLSEAKPATPEIQEIVDKVKPQLEEKTNETYGKLEAVQYKTQ | 856 |
| 3 | VLADHGYARGHHSTNYYIKVRAGDNKYMHLKVFNGPKHIHEHKS | |
| | EADRVLTGYQVDKNKDDELTGF | |
| FcRn-26 | MIPRGLSEAKPATPEIQEIVDKVKPQLEEKTNETYGKLEAVQYKTQ | 857 |
| 4 | VLATPHKIWHWHSTNYYIKVRAGDNKYMHLKVFNGPTKKFHQHE | |
| | RADRVLTGYQVDKNKDDELTGF | |
| FcRn-26 | MIPRGLSEAKPATPEIQEIVDKVKPQLEEKTNETYGKLEAVQYKTQ | 858 |
| 5 | VLASYAQHTRLHSTNYYIKVRAGDNKYMHLKVFNGPTRHHQHYY | |
| | EADRVLTGYQVDKNKDDELTGF | |
| FcRn-26 | MIPRGLSEAKPATPEIQEIVDKVKPQLEEKTNETYGKLEAVQYKTQ | 859 |
| 6 | VLAIDHRYHYLHSTNYYIKVRAGDNKYMHLKVFNGPWYWTQHH | |
| | RWADRVLTGYQVDKNKDDELTGF | |
| FcRn-26 | MIPRGLSEAKPATPEIQEIVDKVKPQLEEKTNETYGKLEAVQYKTQ | 860 |
| 7 | VLAHGYNHRKVQSTNYYIKVRAGDNKYMHLKVFNGPYHVWNW | |
| | RLKADRVLTGYQVDKNKDDELTGF | |
| FcRn-26 | MIPRGLSEAKPATPEIQEIVDKVKPQLEEKTNETYGKLEAVQYKTQ | 861 |
| 8 | VLAGHLKAAPWHSTNYYIKVRAGDNKYMHLKVFNGPFHHFRPHH | |
| | HADRVLTGYQVDKNKDDELTGF | |
| FcRn-26 | MIPRGLSEAKPATPEIQEIVDKVKPQLEEKTNETYGKLEAVQYKTQ | 862 |
| 9 | VLAKEKYASWERSTNYYIKVRAGDNKYMHLKVFNGPFLNGKKRH | |
| | VADRVLTGYQVDKNKDDELTGF | |
| FcRn-27 | MIPRGLSEAKPATPEIQEIVDKVKPQLEEKTNETYGKLEAVQYKTQ | 863 |
| 0 | VLAKGHPHAHPHSTNYYIKVRAGDNKYMHLKVFNGPWWKIHGST | |
| | VADRVLTGYQVDKNKDDELTGF | |
| FcRn-27 | MIPRGLSEAKPATPEIQEIVDKVKPQLEEKTNETYGKLEAVQYKTQ | 864 |
| 1 | VLAPYRRHEHHQSTNYYIKVRAGDNKYMHLKVFNGPNSDFHHNQ | |
| | QADRVLTGYQVDKNKDDELTGF | |
| FcRn-27 | MIPRGLSEAKPATPEIQEIVDKVKPQLEEKTNETYGKLEAVQYKTQ | 865 |
| 2 | VLAGFPHWFVHNSTNYYIKVRAGDNKYMHLKVFNGPTHHLRYHH | |
| | QADRVLTGYQVDKNKDDELTGF | |
| FcRn-27 | MIPRGLSEAKPATPEIQEIVDKVKPQLEEKTNETYGKLEAVQYKTQ | 866 |
| 3 | VLAFRRYQSFHYSTNYYIKVRAGDNKYMHLKVFNGPFYKYHQVR | |
| | WADRVLTGYQVDKNKDDELTGF | |
| FcRn-27 | MIPRGLSEAKPATPEIQEIVDKVKPQLEEKTNETYGKLEAVQYKTQ | 867 |
| 4 | VLAPRYRHHVDYSTNYYIKVRAGDNKYMHLKVFNGPYSFRDHH | |
| | WWADRVLTGYQVDKNKDDELTGF | |
| FcRn-27 | MIPRGLSEAKPATPEIQEIVDKVKPQLEEKTNETYGKLEAVQYKTQ | 868 |
| 5 | VLADYLKRNFRYSTNYYIKVRAGDNKYMHLKVFNGPPFYRNHHH | |
| | EADRVLTGYQVDKNKDDELTGF | |
| FcRn-27 | MIPRGLSEAKPATPEIQEIVDKVKPQLEEKTNETYGKLEAVQYKTQ | 869 |
| 6 | VLARSHPGKHVHSTNYYIKVRAGDNKYMHLKVFNGPFQLNLRWG | |
| | QADRVLTGYQVDKNKDDELTGF | |
| FcRn-27 | MIPRGLSEAKPATPEIQEIVDKVKPQLEEKTNETYGKLEAVQYKTQ | 870 |
| 7 | VLAHHHRWAKWLSTNYYIKVRAGDNKYMHLKVFNGPVHNFHDI | |
| | RHADRVLTGYQVDKNKDDELTGF | |
| FcRn-27 | MIPRGLSEAKPATPEIQEIVDKVKPQLEEKTNETYGKLEAVQYKTQ | 871 |
| 8 | VLAAAHHNHWHISTNYYIKVRAGDNKYMHLKVFNGPAQHGHVP | |
| | FSADRVLTGYQVDKNKDDELTGF | |
| FcRn-27 | MIPRGLSEAKPATPEIQEIVDKVKPQLEEKTNETYGKLEAVQYKTQ | 872 |
| 9 | VLAPVQKHAGSHSTNYYIKVRAGDNKYMHLKVFNGPPWHNAEIK | |
| | HADRVLTGYQVDKNKDDELTGF | |
| FcRn-28 | MIPRGLSEAKPATPEIQEIVDKVKPQLEEKTNETYGKLEAVQYKTQ | 873 |
| 0 | VLADNWRHWRIWSTNYYIKVRAGDNKYMHLKVFNGPAGWSSNK | |
| | ADADRVLTGYQVDKNKDDELTGF | |
| FcRn-28 | MIPRGLSEAKPATPEIQEIVDKVKPQLEEKTNETYGKLEAVQYKTQ | 874 |
| 1 | VLAPRHHHWAFSTNYYIKVRAGDNKYMHLKVFNGPKRQHHDVG | |
| | QADRVLTGYQVDKNKDDELTGF | |
| FcRn-28 | MIPRGLSEAKPATPEIQEIVDKVKPQLEEKTNETYGKLEAVQYKTQ | 875 |
| 2 | VLAVSYDDITWVSTNYYIKVRAGDNKYMHLKVFNGPNSSYGWL | |
| | WWADRVLTGYQVDKNKDDELTGF | |
| FcRn-28 | MIPRGLSEAKPATPEIQEIVDKVKPQLEEKTNETYGKLEAVQYKTQ | 876 |
| 3 | VLAPPHPRVQHYSTNYYIKVRAGDNKYMHLKVFNGPAFRDHRAP | |
| | HADRVLTGYQVDKNKDDELTGF | |
| FcRn-28 | MIPRGLSEAKPATPEIQEIVDKVKPQLEEKTNETYGKLEAVQYKTQ | 877 |
| 4 | VLAKQFRHHQHESTNYYIKVRAGDNKYMHLKVFNGPKWWSTQGI | |
| | VADRVLTGYQVDKNKDDELTGF | |
| FcRn-28 | MIPRGLSEAKPATPEIQEIVDKVKPQLEEKTNETYGKLEAVQYKTQ | 878 |
| 5 | VLAEHHEYHYRYSTNYYIKVRAGDNKYMHLKVFNGPFRPVHHIRI | |
| | ADRVLTGYQVDKNKDDELTGF | |
| FcRn-28 | MIPRGLSEAKPATPEIQEIVDKVKPQLEEKTNETYGKLEAVQYKTQ | 879 |
| 6 | VLAHHHHRQHPSTNYYIKVRAGDNKYMHLKVFNGPKVGQGVNL | |
| | G ADRVLTGYQVDKNKDDELTGF | |
| FcRn-28 | MIPRGLSEAKPATPEIQEIVDKVKPQLEEKTNETYGKLEAVQYKTQ | 880 |
| 7 | VLAKLHQAHHWHSTNYYIKVRAGDNKYMHLKVFNGPEWSNKHY | |
| | QWADRVLTGYQVDKNKDDELTGF | |
| FcRn-28 | MIPRGLSEAKPATPEIQEIVDKVKPQLEEKTNETYGKLEAVQYKTQ | 881 |
| 8 | VLAEYHHYGTSRSTNYYIKVRAGDNKYMHLKVFNGPRQLKHHTN | |
| | F ADRVLTGYQVDKNKDDELTGF | |
| FcRn-28 | MIPRGLSEAKPATPEIQEIVDKVKPQLEEKTNETYGKLEAVQYKTQ | 882 |
| 9 | VLADNKHIPQRQSTNYYIKVRAGDNKYMHLKVFNGPRNHVAEKY | |
| | WADRVLTGYQVDKNKDDELTGF | |
| FcRn-29 | MIPRGLSEAKPATPEIQEIVDKVKPQLEEKTNETYGKLEAVQYKTQ | 883 |
| 0 | VLAHKQWQWTIVSTNYYIKVRAGDNKYMHLKVFNGPAYKSDKIR | |
| | KADRVLTGYQVDKNKDDELTGF | |
| FcRn-29 | MIPRGLSEAKPATPEIQEIVDKVKPQLEEKTNETYGKLEAVQYKTQ | 884 |
| 1 | VLAYRIGHGVQHSTNYYIKVRAGDNKYMHLKVFNGPYDKPYIVW | |
| | IADRVLTGYQVDKNKDDELTGF | |
| FcRn-29 | MIPRGLSEAKPATPEIQEIVDKVKPQLEEKTNETYGKLEAVQYKTQ | 885 |
| 2 | VLADQVRRIPHHSTNYYIKVRAGDNKYMHLKVFNGPHDKHPQSW | |
| | AADRVLTGYQVDKNKDDELTGF | |
| FcRn-29 | MIPRGLSEAKPATPEIQEIVDKVKPQLEEKTNETYGKLEAVQYKTQ | 886 |
| 3 | VLAEGKHEFRFQSTNYYIKVRAGDNKYMHLKVFNGPWDKHRQHL | |
| | WADRVLTGYQVDKNKDDELTGF | |
| FcRn-29 | MIPRGLSEAKPATPEIQEIVDKVKPQLEEKTNETYGKLEAVQYKTQ | 887 |
| 4 | VLAHYWGRWYKISTNYYIKVRAGDNKYMHLKVFNGPFHAFWHL | |
| | AYADRVLTGYQVDKNKDDELTGF | |
| AVA04- | MIPRGLSEAKPATPEIQEIVDKVKPQLEEKTNETYGKLEAVQYKTQ | 1184 |
| 251 FX6 | VLALSFNNYHWHSTNYYIKVRAGDNKYMHLKVFNGPKLRHDKLT | |
| | HADRVLTGYQVDKNKDDELTGFAEAAAKEAAAKEAAAKEAAAK | |
| | EAAAKEAAAKMIPRGLSEAKPATPEIQEIVDKVKPQLEEKTNETYG | |
| | KLEAVQYKTQVLAREGRQDWVLSTNYYIKVRAGDNKYMHLKVF | |
| | NGPWVPFPHQQLADRVLTGYQVDKNKDDELTGFAEAAAKEAAA | |
| | KEAAAKEAAAKEAAAKEAAAKMIPRGLSEAKPATPEIQEIVDKVK | |
| | PQLEEKTNETYGKLEAVQYKTQVLAREGRQDWVLSTNYYIKVRA | |
| | GDNKYMHLKVFNGPWVPFPHQQLADRVLTGYQVDKNKDDELTG | |
| | F | |

TABLE 3
Examples of FeRn Binding AFFIMER® Polynucleotide Sequences

| | | SEQ |
|---|---|---|
| | | ID |
| Name | DNA Sequence | NO: |
| FcRn-01 | ATGATCCCGCGTGGCCTGTCTGAAGCTAAACCAGCAACTCCGGAAA | 888 |
| | TTCAAGAGATCGTCGATAAGGTGAAACCGCAGCTGGAAGAGAAAA | |
| | CGAACGAAACCTACGGTAAGCTGGAAGCGGTCCAGTACAAAACCC | |
| | AAGTGCTAGCACATGTTATCGATCATAAATACCGTCATTCCACCAA | |
| | CTATTACATTAAGGTTCGTGCCGGTGACAATAAGTATATGCACCTG | |
| | AAAGTGTTCAACGGCCCGAAAAAAGTTAACCATCATTACCATAAA | |
| | GCGGACCGTGTTCTGACCGGTTACCAGGTTGACAAGAACAAAGAT | |
| | GACGAGCTGACGGGTTTC | |
| FcRn-02 | ATGATCCCGCGTGGCCTGTCTGAAGCTAAACCAGCAACTCCGGAAA | 889 |
| | TTCAAGAGATCGTCGATAAGGTGAAACCGCAGCTGGAAGAGAAAA | |
| | CGAACGAAACCTACGGTAAGCTGGAAGCGGTCCAGTACAAAACCC | |
| | AAGTGCTAGCACTGAAAGGTCATAAACATCATAAAACCTCCACCA | |
| | ACTATTACATTAAGGTTCGTGCCGGTGACAATAAGTATATGCACCT | |
| | GAAAGTGTTCAACGGCCCGTGGCAGGCAAAACATAAAGATGGTAA | |
| | AGCGGACCGTGTTCTGACCGGTTACCAGGTTGACAAGAACAAAGA | |
| | TGACGAGCTGACGGGTTTC | |
| FcRn-03 | ATGATCCCGCGTGGCCTGTCTGAAGCTAAACCAGCAACTCCGGAAA | 890 |
| | TTCAAGAGATCGTCGATAAGGTGAAACCGCAGCTGGAAGAGAAAA | |
| | CGAACGAAACCTACGGTAAGCTGGAAGCGGTCCAGTACAAAACCC | |
| | AAGTGCTAGCACATAACCATCATAAATACCCACATGGTTCCACCAA | |
| | CTATTACATTAAGGTTCGTGCCGGTGACAATAAGTATATGCACCTG | |
| | AAAGTGTTCAACGGCCCGATCTGGTCTAAACATAACTGGCATTGGG | |
| | CGGACCGTGTTCTGACCGGTTACCAGGTTGACAAGAACAAAGATG | |
| | ACGAGCTGACGGGTTTC | |
| FcRn-04 | ATGATCCCGCGTGGCCTGTCTGAAGCTAAACCAGCAACTCCGGAAA | 891 |
| | TTCAAGAGATCGTCGATAAGGTGAAACCGCAGCTGGAAGAGAAAA | |
| | CGAACGAAACCTACGGTAAGCTGGAAGCGGTCCAGTACAAAACCC | |
| | AAGTGCTAGCAGTTCATAAAAAACATCATAAATGGTTTTCCACCAA | |
| | CTATTACATTAAGGTTCGTGCCGGTGACAATAAGTATATGCACCTG | |
| | AAAGTGTTCAACGGCCCGAAATGGCAGGTTGCACGTCATGATAAC | |
| | GCGGACCGTGTTCTGACCGGTTACCAGGTTGACAAGAACAAAGAT | |
| | GACGAGCTGACGGGTTTC | |
| FcRn-05 | ATGATCCCGCGTGGCCTGTCTGAAGCTAAACCAGCAACTCCGGAAA | 892 |
| | TTCAAGAGATCGTCGATAAGGTGAAACCGCAGCTGGAAGAGAAAA | |
| | CGAACGAAACCTACGGTAAGCTGGAAGCGGTCCAGTACAAAACCC | |
| | AAGTGCTAGCAAAACGTCATGCAGATCATCCACGTGTTTCCACCAA | |
| | CTATTACATTAAGGTTCGTGCCGGTGACAATAAGTATATGCACCTG | |
| | AAAGTGTTCAACGGCCCGGCACATAACTACACCCTGGTTTGGTACG | |
| | CGGACCGTGTTCTGACCGGTTACCAGGTTGACAAGAACAAAGATG | |
| | ACGAGCTGACGGGTTTC | |
| FcRn-06 | ATGATCCCGCGTGGCCTGTCTGAAGCTAAACCAGCAACTCCGGAAA | 893 |
| | TTCAAGAGATCGTCGATAAGGTGAAACCGCAGCTGGAAGAGAAAA | |
| | CGAACGAAACCTACGGTAAGCTGGAAGCGGTCCAGTACAAAACCC | |
| | AAGTGCTAGCACAGCAGCCAAAACAGCATGGTTTTCATTCCACCAA | |
| | CTATTACATTAAGGTTCGTGCCGGTGACAATAAGTATATGCACCTG | |
| | AAAGTGTTCAACGGCCCGTCTTCTGGTAACAAACATAAACATCATG | |
| | CGGACCGTGTTCTGACCGGTTACCAGGTTGACAAGAACAAAGATG | |
| | ACGAGCTGACGGGTTTC | |
| FcRn-07 | ATGATCCCGCGTGGCCTGTCTGAAGCTAAACCAGCAACTCCGGAAA | 894 |
| | TTCAAGAGATCGTCGATAAGGTGAAACCGCAGCTGGAAGAGAAAA | |
| | CGAACGAAACCTACGGTAAGCTGGAAGCGGTCCAGTACAAAACCC | |
| | AAGTGCTAGCACATCATGGTCATCGTACCCATTCTGTTTCCACCAA | |
| | CTATTACATTAAGGTTCGTGCCGGTGACAATAAGTATATGCACCTG | |
| | AAAGTGTTCAACGGCCCGGTTTGGGCACATCATAAAAAATACTACG | |
| | CGGACCGTGTTCTGACCGGTTACCAGGTTGACAAGAACAAAGATG | |
| | ACGAGCTGACGGGTTTC | |
| FcRn-08 | ATGATCCCGCGTGGCCTGTCTGAAGCTAAACCAGCAACTCCGGAAA | 895 |
| | TTCAAGAGATCGTCGATAAGGTGAAACCGCAGCTGGAAGAGAAAA | |
| | CGAACGAAACCTACGGTAAGCTGGAAGCGGTCCAGTACAAAACCC | |
| | AAGTGCTAGCAAAACAGCATCATTGGGATGTTCATCGTTCCACCAA | |
| | CTATTACATTAAGGTTCGTGCCGGTGACAATAAGTATATGCACCTG | |
| | AAAGTGTTCAACGGCCCGAAAGTTAAACATACCCGTATCCATGCGG | |
| | ACCGTGTTCTGACCGGTTACCAGGTTGACAAGAACAAAGATGACG | |
| | AGCTGACGGGTTTC | |
| FcRn-09 | ATGATCCCGCGTGGCCTGTCTGAAGCTAAACCAGCAACTCCGGAAA | 896 |
| | TTCAAGAGATCGTCGATAAGGTGAAACCGCAGCTGGAAGAGAAAA | |
| | CGAACGAAACCTACGGTAAGCTGGAAGCGGTCCAGTACAAAACCC | |
| | AAGTGCTAGCAGGTGGTCAGCCAGCAAAACAGCATTTTTCCACCAA | |
| | CTATTACATTAAGGTTCGTGCCGGTGACAATAAGTATATGCACCTG | |
| | AAAGTGTTCAACGGCCCGCCAAACAAACATCATCATGCACATAAA | |
| | GCGGACCGTGTTCTGACCGGTTACCAGGTTGACAAGAACAAAGAT | |
| | GACGAGCTGACGGGTTTC | |
| FcRn-10 | ATGATCCCGCGTGGCCTGTCTGAAGCTAAACCAGCAACTCCGGAAA | 897 |
| | TTCAAGAGATCGTCGATAAGGTGAAACCGCAGCTGGAAGAGAAAA | |
| | CGAACGAAACCTACGGTAAGCTGGAAGCGGTCCAGTACAAAACCC | |
| | AAGTGCTAGCAAACCATGTTCGTTGGAAAGATCATGATTCCACCAA | |
| | CTATTACATTAAGGTTCGTGCCGGTGACAATAAGTATATGCACCTG | |
| | AAAGTGTTCAACGGCCCGTTTATCAAACGTTACAAACTGCAGCGTG | |
| | CGGACCGTGTTCTGACCGGTTACCAGGTTGACAAGAACAAAGATG | |
| | ACGAGCTGACGGGTTTC | |
| FcRn-11 | ATGATCCCGCGTGGCCTGTCTGAAGCTAAACCAGCAACTCCGGAAA | 898 |
| | TTCAAGAGATCGTCGATAAGGTGAAACCGCAGCTGGAAGAGAAAA | |
| | CGAACGAAACCTACGGTAAGCTGGAAGCGGTCCAGTACAAAACCC | |
| | AAGTGCTAGCACATTCTCATCATCCAGAACATTGGTACTCCACCAA | |
| | CTATTACATTAAGGTTCGTGCCGGTGACAATAAGTATATGCACCTG | |
| | AAAGTGTTCAACGGCCCGCGTAAAGATTGGCATGTTCGTAAACTGG | |
| | CGGACCGTGTTCTGACCGGTTACCAGGTTGACAAGAACAAAGATG | |
| | ACGAGCTGACGGGTTTC | |
| FcRn-12 | ATGATCCCGCGTGGCCTGTCTGAAGCTAAACCAGCAACTCCGGAAA | 899 |
| | TTCAAGAGATCGTCGATAAGGTGAAACCGCAGCTGGAAGAGAAAA | |
| | CGAACGAAACCTACGGTAAGCTGGAAGCGGTCCAGTACAAAACCC | |
| | AAGTGCTAGCAAAAGTTAAAACCCATGATCATCAGCGTTCCACCAA | |
| | CTATTACATTAAGGTTCGTGCCGGTGACAATAAGTATATGCACCTG | |
| | AAAGTGTTCAACGGCCCGATCCATCAGCATCATTCTCAGGATTGGG | |
| | CGGACCGTGTTCTGACCGGTTACCAGGTTGACAAGAACAAAGATG | |
| | ACGAGCTGACGGGTTTC | |
| FcRn-13 | ATGATCCCGCGTGGCCTGTCTGAAGCTAAACCAGCAACTCCGGAAA | 900 |
| | TTCAAGAGATCGTCGATAAGGTGAAACCGCAGCTGGAAGAGAAAA | |
| | CGAACGAAACCTACGGTAAGCTGGAAGCGGTCCAGTACAAAACCC | |
| | AAGTGCTAGCATACCGTGAAGTTTCTAAACGTCGTACCTCCACCAA | |
| | CTATTACATTAAGGTTCGTGCCGGTGACAATAAGTATATGCACCTG | |
| | AAAGTGTTCAACGGCCCGAACCAGAAACAGGGTCATAAACATAAA | |
| | GCGGACCGTGTTCTGACCGGTTACCAGGTTGACAAGAACAAAGAT | |
| | GACGAGCTGACGGGTTTC | |
| FcRn-14 | ATGATCCCGCGTGGCCTGTCTGAAGCTAAACCAGCAACTCCGGAAA | 901 |
| | TTCAAGAGATCGTCGATAAGGTGAAACCGCAGCTGGAAGAGAAAA | |
| | CGAACGAAACCTACGGTAAGCTGGAAGCGGTCCAGTACAAAACCC | |
| | AAGTGCTAGCAGTTACCAAACGTGCATGGCTGAAAATCTCCACCAA | |
| | CTATTACATTAAGGTTCGTGCCGGTGACAATAAGTATATGCACCTG | |
| | AAAGTGTTCAACGGCCCGTTTTACGCACAGAAACGTACCTCTTACG | |
| | CGGACCGTGTTCTGACCGGTTACCAGGTTGACAAGAACAAAGATG | |
| | ACGAGCTGACGGGTTTC | |
| FcRn-15 | ATGATCCCGCGTGGCCTGTCTGAAGCTAAACCAGCAACTCCGGAAA | 902 |
| | TTCAAGAGATCGTCGATAAGGTGAAACCGCAGCTGGAAGAGAAAA | |
| | CGAACGAAACCTACGGTAAGCTGGAAGCGGTCCAGTACAAAACCC | |
| | AAGTGCTAGCACATAACCATCGTCATTACTCTAAAGGTTCCACCAA | |
| | CTATTACATTAAGGTTCGTGCCGGTGACAATAAGTATATGCACCTG | |
| | AAAGTGTTCAACGGCCCGGCATTTAACGATGGTGCAGTTTTTATCG | |
| | CGGACCGTGTTCTGACCGGTTACCAGGTTGACAAGAACAAAGATG | |
| | ACGAGCTGACGGGTTTC | |
| FcRn-16 | ATGATCCCGCGTGGCCTGTCTGAAGCTAAACCAGCAACTCCGGAAA | 903 |
| | TTCAAGAGATCGTCGATAAGGTGAAACCGCAGCTGGAAGAGAAAA | |
| | CGAACGAAACCTACGGTAAGCTGGAAGCGGTCCAGTACAAAACCC | |
| | AAGTGCTAGCAAAACATCATCATCATAAACATCAGCATTCCACCAA | |
| | CTATTACATTAAGGTTCGTGCCGGTGACAATAAGTATATGCACCTG | |
| | AAAGTGTTCAACGGCCCGGTTTTTCTGCATAACGAATCTCATCAGG | |
| | CGGACCGTGTTCTGACCGGTTACCAGGTTGACAAGAACAAAGATG | |
| | ACGAGCTGACGGGTTTC | |
| FcRn-17 | ATGATCCCGCGTGGCCTGTCTGAAGCTAAACCAGCAACTCCGGAAA | 904 |
| | TTCAAGAGATCGTCGATAAGGTGAAACCGCAGCTGGAAGAGAAAA | |
| | CGAACGAAACCTACGGTAAGCTGGAAGCGGTCCAGTACAAAACCC | |
| | AAGTGCTAGCACATCCACATCATGTTCGTTCTTCTGTTTCCACCAAC | |
| | TATTACATTAAGGTTCGTGCCGGTGACAATAAGTATATGCACCTGA | |
| | AAGTGTTCAACGGCCCGAAAGGTCATTTTCATACCCATCTGGTTGC | |
| | GGACCGTGTTCTGACCGGTTACCAGGTTGACAAGAACAAAGATGA | |
| | CGAGCTGACGGGTTTC | |
| FcRn-18 | ATGATCCCGCGTGGCCTGTCTGAAGCTAAACCAGCAACTCCGGAAA | 905 |
| | TTCAAGAGATCGTCGATAAGGTGAAACCGCAGCTGGAAGAGAAAA | |
| | CGAACGAAACCTACGGTAAGCTGGAAGCGGTCCAGTACAAAACCC | |
| | AAGTGCTAGCAGAAACCCCACATGAACGTCATAAAACCTCCACCA | |
| | ACTATTACATTAAGGTTCGTGCCGGTGACAATAAGTATATGCACCT | |
| | GAAAGTGTTCAACGGCCCGAAACGTTGGCTGAAACATCATGCACA | |
| | TGCGGACCGTGTTCTGACCGGTTACCAGGTTGACAAGAACAAAGAT | |
| | GACGAGCTGACGGGTTTC | |
| FcRn-19 | ATGATCCCGCGTGGCCTGTCTGAAGCTAAACCAGCAACTCCGGAAA | 906 |
| | TTCAAGAGATCGTCGATAAGGTGAAACCGCAGCTGGAAGAGAAAA | |
| | CGAACGAAACCTACGGTAAGCTGGAAGCGGTCCAGTACAAAACCC | |
| | AAGTGCTAGCAGGTACCATCCAGCATGTTAACCAGCATTCCACCAA | |
| | CTATTACATTAAGGTTCGTGCCGGTGACAATAAGTATATGCACCTG | |
| | AAAGTGTTCAACGGCCCGTACGGTCATAAACATCATTTTCATTGGG | |
| | CGGACCGTGTTCTGACCGGTTACCAGGTTGACAAGAACAAAGATG | |
| | ACGAGCTGACGGGTTTC | |
| FcRn-20 | ATGATCCCGCGTGGCCTGTCTGAAGCTAAACCAGCAACTCCGGAAA | 907 |
| | TTCAAGAGATCGTCGATAAGGTGAAACCGCAGCTGGAAGAGAAAA | |
| | CGAACGAAACCTACGGTAAGCTGGAAGCGGTCCAGTACAAAACCC | |
| | AAGTGCTAGCATACAACGTTGGTCGTAAAAAACATCGTTCCACCAA | |
| | CTATTACATTAAGGTTCGTGCCGGTGACAATAAGTATATGCACCTG | |
| | AAAGTGTTCAACGGCCCGGTTCATTTTTTTCATGATCAGTCTGAAG | |
| | CGGACCGTGTTCTGACCGGTTACCAGGTTGACAAGAACAAAGATG | |
| | ACGAGCTGACGGGTTTC | |
| FcRn-21 | ATGATCCCGCGTGGCCTGTCTGAAGCTAAACCAGCAACTCCGGAAA | 908 |
| | TTCAAGAGATCGTCGATAAGGTGAAACCGCAGCTGGAAGAGAAAA | |
| | CGAACGAAACCTACGGTAAGCTGGAAGCGGTCCAGTACAAAACCC | |
| | AAGTGCTAGCACGTCGTGGTCCACAGAAATCTTCTTACTCCACCAA | |
| | CTATTACATTAAGGTTCGTGCCGGTGACAATAAGTATATGCACCTG | |
| | AAAGTGTTCAACGGCCCGCAGAAAAAAAACCGTCATCATCAGAAA | |
| | GCGGACCGTGTTCTGACCGGTTACCAGGTTGACAAGAACAAAGAT | |
| | GACGAGCTGACGGGTTTC | |
| FcRn-22 | ATGATCCCGCGTGGCCTGTCTGAAGCTAAACCAGCAACTCCGGAAA | 909 |
| | TTCAAGAGATCGTCGATAAGGTGAAACCGCAGCTGGAAGAGAAAA | |
| | CGAACGAAACCTACGGTAAGCTGGAAGCGGTCCAGTACAAAACCC | |
| | AAGTGCTAGCACATGATCGTCATCAGAAACATTGGCGTTCCACCAA | |
| | CTATTACATTAAGGTTCGTGCCGGTGACAATAAGTATATGCACCTG | |
| | AAAGTGTTCAACGGCCCGGATCTGCGTAAACATAAATGGAAATCT | |
| | GCGGACCGTGTTCTGACCGGTTACCAGGTTGACAAGAACAAAGAT | |
| | GACGAGCTGACGGGTTTC | |
| FcRn-23 | ATGATCCCGCGTGGCCTGTCTGAAGCTAAACCAGCAACTCCGGAAA | 910 |
| | TTCAAGAGATCGTCGATAAGGTGAAACCGCAGCTGGAAGAGAAAA | |
| | CGAACGAAACCTACGGTAAGCTGGAAGCGGTCCAGTACAAAACCC | |
| | AAGTGCTAGCAATCCCACATCATCATAAACCACGTGTTTCCACCAA | |
| | CTATTACATTAAGGTTCGTGCCGGTGACAATAAGTATATGCACCTG | |
| | AAAGTGTTCAACGGCCCGTCTTTTCATCATCATCGTCATTCTGATGC | |
| | GGACCGTGTTCTGACCGGTTACCAGGTTGACAAGAACAAAGATGA | |
| | CGAGCTGACGGGTTTC | |
| FcRn-24 | ATGATCCCGCGTGGCCTGTCTGAAGCTAAACCAGCAACTCCGGAAA | 911 |
| | TTCAAGAGATCGTCGATAAGGTGAAACCGCAGCTGGAAGAGAAAA | |
| | CGAACGAAACCTACGGTAAGCTGGAAGCGGTCCAGTACAAAACCC | |
| | AAGTGCTAGCAAAAGGTAAACATTACCATTCTCAGCAGTCCACCAA | |
| | CTATTACATTAAGGTTCGTGCCGGTGACAATAAGTATATGCACCTG | |
| | AAAGTGTTCAACGGCCCGGAATTTTACCAGGGTCATTGGACCAACG | |
| | CGGACCGTGTTCTGACCGGTTACCAGGTTGACAAGAACAAAGATG | |
| | ACGAGCTGACGGGTTTC | |
| FcRn-25 | ATGATCCCGCGTGGCCTGTCTGAAGCTAAACCAGCAACTCCGGAAA | 912 |
| | TTCAAGAGATCGTCGATAAGGTGAAACCGCAGCTGGAAGAGAAAA | |
| | CGAACGAAACCTACGGTAAGCTGGAAGCGGTCCAGTACAAAACCC | |
| | AAGTGCTAGCACATAAACATAAACATCATCATACCAACTCCACCAA | |
| | CTATTACATTAAGGTTCGTGCCGGTGACAATAAGTATATGCACCTG | |
| | AAAGTGTTCAACGGCCCGGTTGGTCATCATTGGTGGCTGAAAGAAG | |
| | CGGACCGTGTTCTGACCGGTTACCAGGTTGACAAGAACAAAGATG | |
| | ACGAGCTGACGGGTTTC | |
| FcRn-26 | ATGATCCCGCGTGGCCTGTCTGAAGCTAAACCAGCAACTCCGGAAA | 913 |
| | TTCAAGAGATCGTCGATAAGGTGAAACCGCAGCTGGAAGAGAAAA | |
| | CGAACGAAACCTACGGTAAGCTGGAAGCGGTCCAGTACAAAACCC | |
| | AAGTGCTAGCAGGTCGTCATAAACATATCCAGGTTCATTCCACCAA | |
| | CTATTACATTAAGGTTCGTGCCGGTGACAATAAGTATATGCACCTG | |
| | AAAGTGTTCAACGGCCCGGTTGGTACCAAACATCTGCGTCAGTCTG | |
| | CGGACCGTGTTCTGACCGGTTACCAGGTTGACAAGAACAAAGATG | |
| | ACGAGCTGACGGGTTTC | |
| FcRn-27 | ATGATCCCGCGTGGCCTGTCTGAAGCTAAACCAGCAACTCCGGAAA | 914 |
| | TTCAAGAGATCGTCGATAAGGTGAAACCGCAGCTGGAAGAGAAAA | |
| | CGAACGAAACCTACGGTAAGCTGGAAGCGGTCCAGTACAAAACCC | |
| | AAGTGCTAGCACCACATCAGCATAAACTGCATGCACATTCCACCAA | |
| | CTATTACATTAAGGTTCGTGCCGGTGACAATAAGTATATGCACCTG | |
| | AAAGTGTTCAACGGCCCGAAACGTCGTCGTCATCCATCTCGTGGTG | |
| | CGGACCGTGTTCTGACCGGTTACCAGGTTGACAAGAACAAAGATG | |
| | ACGAGCTGACGGGTTTC | |
| FcRn-28 | ATGATCCCGCGTGGCCTGTCTGAAGCTAAACCAGCAACTCCGGAAA | 915 |
| | TTCAAGAGATCGTCGATAAGGTGAAACCGCAGCTGGAAGAGAAAA | |
| | CGAACGAAACCTACGGTAAGCTGGAAGCGGTCCAGTACAAAACCC | |
| | AAGTGCTAGCACGTCGTGATCATGTTTGGCATAAAGGTTCCACCAA | |
| | CTATTACATTAAGGTTCGTGCCGGTGACAATAAGTATATGCACCTG | |
| | AAAGTGTTCAACGGCCCGAACCATGTTCATAACAAACATATCCATG | |
| | CGGACCGTGTTCTGACCGGTTACCAGGTTGACAAGAACAAAGATG | |
| | ACGAGCTGACGGGTTTC | |
| FcRn-29 | ATGATCCCGCGTGGCCTGTCTGAAGCTAAACCAGCAACTCCGGAAA | 916 |
| | TTCAAGAGATCGTCGATAAGGTGAAACCGCAGCTGGAAGAGAAAA | |
| | CGAACGAAACCTACGGTAAGCTGGAAGCGGTCCAGTACAAAACCC | |
| | AAGTGCTAGCATCTCATCGTTCTCATGCAGATCGTCGTTCCACCAA | |
| | CTATTACATTAAGGTTCGTGCCGGTGACAATAAGTATATGCACCTG | |
| | AAAGTGTTCAACGGCCCGACCCAGTCTCATCCACATCGTCATTACG | |
| | CGGACCGTGTTCTGACCGGTTACCAGGTTGACAAGAACAAAGATG | |
| | ACGAGCTGACGGGTTTC | |
| FcRn-30 | ATGATCCCGCGTGGCCTGTCTGAAGCTAAACCAGCAACTCCGGAAA | 917 |
| | TTCAAGAGATCGTCGATAAGGTGAAACCGCAGCTGGAAGAGAAAA | |
| | CGAACGAAACCTACGGTAAGCTGGAAGCGGTCCAGTACAAAACCC | |
| | AAGTGCTAGCATCTTCTCAGAACGGTTACCAGGGTCATTCCACCAA | |
| | CTATTACATTAAGGTTCGTGCCGGTGACAATAAGTATATGCACCTG | |
| | AAAGTGTTCAACGGCCCGTACCGTCATCATCATCATTGGCATTTTG | |
| | CGGACCGTGTTCTGACCGGTTACCAGGTTGACAAGAACAAAGATG | |
| | ACGAGCTGACGGGTTTC | |
| FcRn-31 | ATGATCCCGCGTGGCCTGTCTGAAGCTAAACCAGCAACTCCGGAAA | 918 |
| | TTCAAGAGATCGTCGATAAGGTGAAACCGCAGCTGGAAGAGAAAA | |
| | CGAACGAAACCTACGGTAAGCTGGAAGCGGTCCAGTACAAAACCC | |
| | AAGTGCTAGCAACCGAAGGTGGTAAAAAACTGCGTCGTTCCACCA | |
| | ACTATTACATTAAGGTTCGTGCCGGTGACAATAAGTATATGCACCT | |
| | GAAAGTGTTCAACGGCCCGGAATGGACCCATGGTAAAGAAAACCA | |
| | TGCGGACCGTGTTCTGACCGGTTACCAGGTTGACAAGAACAAAGAT | |
| | GACGAGCTGACGGGTTTC | |
| FcRn-32 | ATGATCCCGCGTGGCCTGTCTGAAGCTAAACCAGCAACTCCGGAAA | 919 |
| | TTCAAGAGATCGTCGATAAGGTGAAACCGCAGCTGGAAGAGAAAA | |
| | CGAACGAAACCTACGGTAAGCTGGAAGCGGTCCAGTACAAAACCC | |
| | AAGTGCTAGCAAAAGCACGTCATCATCAGGGTCATGCATCCACCA | |
| | ACTATTACATTAAGGTTCGTGCCGGTGACAATAAGTATATGCACCT | |
| | GAAAGTGTTCAACGGCCCGTGGTACCAGTTTGATGGTGTTTCTTTT | |
| | GCGGACCGTGTTCTGACCGGTTACCAGGTTGACAAGAACAAAGAT | |
| | GACGAGCTGACGGGTTTC | |
| FcRn-33 | ATGATCCCGCGTGGCCTGTCTGAAGCTAAACCAGCAACTCCGGAAA | 920 |
| | TTCAAGAGATCGTCGATAAGGTGAAACCGCAGCTGGAAGAGAAAA | |
| | CGAACGAAACCTACGGTAAGCTGGAAGCGGTCCAGTACAAAACCC | |
| | AAGTGCTAGCAAACCATTCTCAGGGTCGTCATCATATCTCCACCAA | |
| | CTATTACATTAAGGTTCGTGCCGGTGACAATAAGTATATGCACCTG | |
| | AAAGTGTTCAACGGCCCGAAAAAAGTTCGTCATGAATACGCATGG | |
| | GCGGACCGTGTTCTGACCGGTTACCAGGTTGACAAGAACAAAGAT | |
| | GACGAGCTGACGGGTTTC | |
| FcRn-34 | ATGATCCCGCGTGGCCTGTCTGAAGCTAAACCAGCAACTCCGGAAA | 921 |
| | TTCAAGAGATCGTCGATAAGGTGAAACCGCAGCTGGAAGAGAAAA | |
| | CGAACGAAACCTACGGTAAGCTGGAAGCGGTCCAGTACAAAACCC | |
| | AAGTGCTAGCAAAATACTGGAAAGCAGATTGGTACTGGTCCACCA | |
| | ACTATTACATTAAGGTTCGTGCCGGTGACAATAAGTATATGCACCT | |
| | GAAAGTGTTCAACGGCCCGGAACATTCTTGGTGGCGTCGTGGTCAT | |
| | GCGGACCGTGTTCTGACCGGTTACCAGGTTGACAAGAACAAAGAT | |
| | GACGAGCTGACGGGTTTC | |
| FcRn-35 | ATGATCCCGCGTGGCCTGTCTGAAGCTAAACCAGCAACTCCGGAAA | 922 |
| | TTCAAGAGATCGTCGATAAGGTGAAACCGCAGCTGGAAGAGAAAA | |
| | CGAACGAAACCTACGGTAAGCTGGAAGCGGTCCAGTACAAAACCC | |
| | AAGTGCTAGCACATCGTCAGTACCCACCAGGTCCACATTCCACCAA | |
| | CTATTACATTAAGGTTCGTGCCGGTGACAATAAGTATATGCACCTG | |
| | AAAGTGTTCAACGGCCCGTACCATTTTCATCATTACTACAAACATG | |
| | CGGACCGTGTTCTGACCGGTTACCAGGTTGACAAGAACAAAGATG | |
| | ACGAGCTGACGGGTTTC | |
| FcRn-36 | ATGATCCCGCGTGGCCTGTCTGAAGCTAAACCAGCAACTCCGGAAA | 923 |
| | TTCAAGAGATCGTCGATAAGGTGAAACCGCAGCTGGAAGAGAAAA | |
| | CGAACGAAACCTACGGTAAGCTGGAAGCGGTCCAGTACAAAACCC | |
| | AAGTGCTAGCACGTCAGCATCATCATTTTTACCGTACCTCCACCAA | |
| | CTATTACATTAAGGTTCGTGCCGGTGACAATAAGTATATGCACCTG | |
| | AAAGTGTTCAACGGCCCGTGGCAGAACTTTCATGATCCATTTGATG | |
| | CGGACCGTGTTCTGACCGGTTACCAGGTTGACAAGAACAAAGATG | |
| | ACGAGCTGACGGGTTTC | |
| FcRn-37 | ATGATCCCGCGTGGCCTGTCTGAAGCTAAACCAGCAACTCCGGAAA | 924 |
| | TTCAAGAGATCGTCGATAAGGTGAAACCGCAGCTGGAAGAGAAAA | |
| | CGAACGAAACCTACGGTAAGCTGGAAGCGGTCCAGTACAAAACCC | |
| | AAGTGCTAGCACCACAGCAGCATCAGCCAGATCCAACCTCCACCA | |
| | ACTATTACATTAAGGTTCGTGCCGGTGACAATAAGTATATGCACCT | |
| | GAAAGTGTTCAACGGCCCGGCACGTCAGCATCATCATCATTCTCAT | |
| | GCGGACCGTGTTCTGACCGGTTACCAGGTTGACAAGAACAAAGAT | |
| | GACGAGCTGACGGGTTTC | |
| FcRn-38 | ATGATCCCGCGTGGCCTGTCTGAAGCTAAACCAGCAACTCCGGAAA | 925 |
| | TTCAAGAGATCGTCGATAAGGTGAAACCGCAGCTGGAAGAGAAAA | |
| | CGAACGAAACCTACGGTAAGCTGGAAGCGGTCCAGTACAAAACCC | |
| | AAGTGCTAGCACTGTCTTTTAACAACTACCATTGGCATTCCACCAA | |
| | CTATTACATTAAGGTTCGTGCCGGTGACAATAAGTATATGCACCTG | |
| | AAAGTGTTCAACGGCCCGAAACTGCGTCATGATAAACTGACCCATG | |
| | CGGACCGTGTTCTGACCGGTTACCAGGTTGACAAGAACAAAGATG | |
| | ACGAGCTGACGGGTTTC | |
| FcRn-39 | ATGATCCCGCGTGGCCTGTCTGAAGCTAAACCAGCAACTCCGGAAA | 926 |
| | TTCAAGAGATCGTCGATAAGGTGAAACCGCAGCTGGAAGAGAAAA | |
| | CGAACGAAACCTACGGTAAGCTGGAAGCGGTCCAGTACAAAACCC | |
| | AAGTGCTAGCACATCATTCTAAACATCATCATCTGCATTCCACCAA | |
| | CTATTACATTAAGGTTCGTGCCGGTGACAATAAGTATATGCACCTG | |
| | AAAGTGTTCAACGGCCCGAACCATAAATTTCAGTCTTACCAGCCAG | |
| | CGGACCGTGTTCTGACCGGTTACCAGGTTGACAAGAACAAAGATG | |
| | ACGAGCTGACGGGTTTC | |
| FcRn-40 | ATGATCCCGCGTGGCCTGTCTGAAGCTAAACCAGCAACTCCGGAAA | 927 |
| | TTCAAGAGATCGTCGATAAGGTGAAACCGCAGCTGGAAGAGAAAA | |
| | CGAACGAAACCTACGGTAAGCTGGAAGCGGTCCAGTACAAAACCC | |
| | AAGTGCTAGCACATAAATACGATCGTCATTCTTTTAAATCCACCAA | |
| | CTATTACATTAAGGTTCGTGCCGGTGACAATAAGTATATGCACCTG | |
| | AAAGTGTTCAACGGCCCGGGTAAACATTCTGGTGCACGTCATAAAG | |
| | CGGACCGTGTTCTGACCGGTTACCAGGTTGACAAGAACAAAGATG | |
| | ACGAGCTGACGGGTTTC | |
| FcRn-41 | ATGATCCCGCGTGGCCTGTCTGAAGCTAAACCAGCAACTCCGGAAA | 928 |
| | TTCAAGAGATCGTCGATAAGGTGAAACCGCAGCTGGAAGAGAAAA | |
| | CGAACGAAACCTACGGTAAGCTGGAAGCGGTCCAGTACAAAACCC | |
| | AAGTGCTAGCAAAACATTCTCGTCATCATCATGCACAGTACACCAA | |
| | CTATTACATTAAGGTTCGTGCCGGTGACAATAAGTATATGCACCTG | |
| | AAAGTGTTCAACGGCCCGAACATCCATCATGAAGGTAAAATCCCA | |
| | GCGGACCGTGTTCTGACCGGTTACCAGGTTGACAAGAACAAAGAT | |
| | GACGAGCTGACGGGTTTC | |
| FcRn-42 | ATGATCCCGCGTGGCCTGTCTGAAGCTAAACCAGCAACTCCGGAAA | 929 |
| | TTCAAGAGATCGTCGATAAGGTGAAACCGCAGCTGGAAGAGAAAA | |
| | CGAACGAAACCTACGGTAAGCTGGAAGCGGTCCAGTACAAAACCC | |
| | AAGTGCTAGCACGTCATCATCATTCTCATTTTCATCTGTCCACCAAC | |
| | TATTACATTAAGGTTCGTGCCGGTGACAATAAGTATATGCACCTGA | |
| | AAGTGTTCAACGGCCCGATCCGTCAGTCTTCTTACAAAGTTCATGC | |
| | GGACCGTGTTCTGACCGGTTACCAGGTTGACAAGAACAAAGATGA | |
| | CGAGCTGACGGGTTTC | |
| FcRn-43 | ATGATCCCGCGTGGCCTGTCTGAAGCTAAACCAGCAACTCCGGAAA | 930 |
| | TTCAAGAGATCGTCGATAAGGTGAAACCGCAGCTGGAAGAGAAAA | |
| | CGAACGAAACCTACGGTAAGCTGGAAGCGGTCCAGTACAAAACCC | |
| | AAGTGCTAGCACGTAACCATCGTCATCCACATGGTCAGTCCACCAA | |
| | CTATTACATTAAGGTTCGTGCCGGTGACAATAAGTATATGCACCTG | |
| | AAAGTGTTCAACGGCCCGGTTCAGCATCGTTGGTCTCTGCATTGGG | |
| | CGGACCGTGTTCTGACCGGTTACCAGGTTGACAAGAACAAAGATG | |
| | ACGAGCTGACGGGTTTC | |
| FcRn-44 | ATGATCCCGCGTGGCCTGTCTGAAGCTAAACCAGCAACTCCGGAAA | 931 |
| | TTCAAGAGATCGTCGATAAGGTGAAACCGCAGCTGGAAGAGAAAA | |
| | CGAACGAAACCTACGGTAAGCTGGAAGCGGTCCAGTACAAAACCC | |
| | AAGTGCTAGCAGGTCATGTTGAACAGGTTCATTTTCCATACACCAA | |
| | CTATTACATTAAGGTTCGTGCCGGTGACAATAAGTATATGCACCTG | |
| | AAAGTGTTCAACGGCCCGGGTCATAAACATCATCATCATTGGTCTG | |
| | CGGACCGTGTTCTGACCGGTTACCAGGTTGACAAGAACAAAGATG | |
| | ACGAGCTGACGGGTTTC | |
| FcRn-45 | ATGATCCCGCGTGGCCTGTCTGAAGCTAAACCAGCAACTCCGGAAA | 932 |
| | TTCAAGAGATCGTCGATAAGGTGAAACCGCAGCTGGAAGAGAAAA | |
| | CGAACGAAACCTACGGTAAGCTGGAAGCGGTCCAGTACAAAACCC | |
| | AAGTGCTAGCAGAACCACATAAACATCATTACCATCTGTCCACCAA | |
| | CTATTACATTAAGGTTCGTGCCGGTGACAATAAGTATATGCACCTG | |
| | AAAGTGTTCAACGGCCCGGTTCCAGGTCAGCAGCCAATCAAAAAC | |
| | GCGGACCGTGTTCTGACCGGTTACCAGGTTGACAAGAACAAAGAT | |
| | GACGAGCTGACGGGTTTC | |
| FcRn-46 | ATGATCCCGCGTGGCCTGTCTGAAGCTAAACCAGCAACTCCGGAAA | 933 |
| | TTCAAGAGATCGTCGATAAGGTGAAACCGCAGCTGGAAGAGAAAA | |
| | CGAACGAAACCTACGGTAAGCTGGAAGCGGTCCAGTACAAAACCC | |
| | AAGTGCTAGCATGGAAAAAACATAACTGGAAATACAAATCCACCA | |
| | ACTATTACATTAAGGTTCGTGCCGGTGACAATAAGTATATGCACCT | |
| | GAAAGTGTTCAACGGCCCGTGGGCAGCAAAACGTGATTGGCGTAA | |
| | CGCGGACCGTGTTCTGACCGGTTACCAGGTTGACAAGAACAAAGA | |
| | TGACGAGCTGACGGGTTTC | |
| FcRn-47 | ATGATCCCGCGTGGCCTGTCTGAAGCTAAACCAGCAACTCCGGAAA | 934 |
| | TTCAAGAGATCGTCGATAAGGTGAAACCGCAGCTGGAAGAGAAAA | |
| | CGAACGAAACCTACGGTAAGCTGGAAGCGGTCCAGTACAAAACCC | |
| | AAGTGCTAGCAATCCATCATCATACCTGGGGTCTGAAATCCACCAA | |
| | CTATTACATTAAGGTTCGTGCCGGTGACAATAAGTATATGCACCTG | |
| | AAAGTGTTCAACGGCCCGTACGGTGATCAGCCATTTAAACGTCATG | |
| | CGGACCGTGTTCTGACCGGTTACCAGGTTGACAAGAACAAAGATG | |
| | ACGAGCTGACGGGTTTC | |
| FcRn-48 | ATGATCCCGCGTGGCCTGTCTGAAGCTAAACCAGCAACTCCGGAAA | 935 |
| | TTCAAGAGATCGTCGATAAGGTGAAACCGCAGCTGGAAGAGAAAA | |
| | CGAACGAAACCTACGGTAAGCTGGAAGCGGTCCAGTACAAAACCC | |
| | AAGTGCTAGCAAAACCAAAATACCATCATCATGATATCTCCACCAA | |
| | CTATTACATTAAGGTTCGTGCCGGTGACAATAAGTATATGCACCTG | |
| | AAAGTGTTCAACGGCCCGGGTCATCATGCAAAACCACATCGTTGGG | |
| | CGGACCGTGTTCTGACCGGTTACCAGGTTGACAAGAACAAAGATG | |
| | ACGAGCTGACGGGTTTC | |
| FcRn-49 | ATGATCCCGCGTGGCCTGTCTGAAGCTAAACCAGCAACTCCGGAAA | 936 |
| | TTCAAGAGATCGTCGATAAGGTGAAACCGCAGCTGGAAGAGAAAA | |
| | CGAACGAAACCTACGGTAAGCTGGAAGCGGTCCAGTACAAAACCC | |
| | AAGTGCTAGCACAGTACTGGCATTCTCATGAAACCTGGTCCACCAA | |
| | CTATTACATTAAGGTTCGTGCCGGTGACAATAAGTATATGCACCTG | |
| | AAAGTGTTCAACGGCCCGTTTCTGAAAGTTCGTACCATCCGTTCTG | |
| | CGGACCGTGTTCTGACCGGTTACCAGGTTGACAAGAACAAAGATG | |
| | ACGAGCTGACGGGTTTC | |
| FcRn-50 | ATGATCCCGCGTGGCCTGTCTGAAGCTAAACCAGCAACTCCGGAAA | 937 |
| | TTCAAGAGATCGTCGATAAGGTGAAACCGCAGCTGGAAGAGAAAA | |
| | CGAACGAAACCTACGGTAAGCTGGAAGCGGTCCAGTACAAAACCC | |
| | AAGTGCTAGCACGTAAACAGTACCATCTGCCATGGACCTCCACCAA | |
| | CTATTACATTAAGGTTCGTGCCGGTGACAATAAGTATATGCACCTG | |
| | AAAGTGTTCAACGGCCCGCTGTCTCAGTTTCAGACCCATCTGTGGG | |
| | CGGACCGTGTTCTGACCGGTTACCAGGTTGACAAGAACGAAGATG | |
| | ACGAGCTGACGGGTTTC | |
| FcRn-51 | ATGATCCCGCGTGGCCTGTCTGAAGCTAAACCAGCAACTCCGGAAA | 938 |
| | TTCAAGAGATCGTCGATAAGGTGAAACCGCAGCTGGAAGAGAAAA | |
| | CGAACGAAACCTACGGTAAGCTGGAAGCGGTCCAGTACAAAACCC | |
| | AAGTGCTAGCAGCAATCCATTGGGCACATTACATCCTGTCCACCAA | |
| | CTATTACATTAAGGTTCGTGCCGGTGACAATAAGTATATGCACCTG | |
| | AAAGTGTTCAACGGCCCGGTTCTGTGGCGTTACTACTACCCAAAAG | |
| | CGGACCGTGTTCTGACCGGTTACCAGGTTGACAAGAACAAAGATG | |
| | ACGAGCTGACGGGTTTC | |
| FcRn-52 | ATGATCCCGCGTGGCCTGTCTGAAGCTAAACCAGCAACTCCGGAAA | 939 |
| | TTCAAGAGATCGTCGATAAGGTGAAACCGCAGCTGGAAGAGAAAA | |
| | CGAACGAAACCTACGGTAAGCTGGAAGCGGTCCAGTACAAAACCC | |
| | AAGTGCTAGCAGATTGGCGTAAACTGACCCTGTTTTCCACCAACTA | |
| | TTACATTAAGGTTCGTGCCGGTGACAATAAGTATATGCACCTGAAA | |
| | GTGTTCAACGGCCCGCATCATCAGCATTGGCATGTTTTTCCAGCGG | |
| | ACCGTGTTCTGACCGGTTACCAGGTTGACAAGAACAAAGATGACG | |
| | AGCTGACGGGTTTC | |
| FcRn-53 | ATGATCCCGCGTGGCCTGTCTGAAGCTAAACCAGCAACTCCGGAAA | 940 |
| | TTCAAGAGATCGTCGATAAGGTGAAACCGCAGCTGGAAGAGAAAA | |
| | CGAACGAAACCTACGGTAAGCTGGAAGCGGTCCAGTACAAAACCC | |
| | AAGTGCTAGCAACCAAATCTCATAAATTTGCATACCATTCCACCAA | |
| | CTATTACATTAAGGTTCGTGCCGGTGACAATAAGTATATGCACCTG | |
| | AAAGTGTTCAACGGCCCGATCGTTCAGGAATTTTCTCTGGATCAGT | |
| | GGGCGGACCGTGTTCTGACCGGTTACCAGGTTGACAAGAACAAAG | |
| | ATGACGAGCTGACGGGTTTC | |
| FcRn-54 | ATGATCCCGCGTGGCCTGTCTGAAGCTAAACCAGCAACTCCGGAAA | 941 |
| | TTCAAGAGATCGTCGATAAGGTGAAACCGCAGCTGGAAGAGAAAA | |
| | CGAACGAAACCTACGGTAAGCTGGAAGCGGTCCAGTACAAAACCC | |
| | AAGTGCTAGCATCTAAATACGTTCATTGGCATAAATTTTCCACCAA | |
| | CTATTACATTAAGGTTCGTGCCGGTGACAATAAGTATATGCACCTG | |
| | AAAGTGTTCAACGGCCCGTGGAAAATCAACAACCTGTACCATGAA | |
| | GCGGACCGTGTTCTGACCGGTTACCAGGTTGACAAGAACAAAGAT | |
| | GACGAGCTGACGGGTTTC | |
| FcRn-55 | ATGATCCCGCGTGGCCTGTCTGAAGCTAAACCAGCAACTCCGGAAA | 942 |
| | TTCAAGAGATCGTCGATAAGGTGAAACCGCAGCTGGAAGAGAAAA | |
| | CGAACGAAACCTACGGTAAGCTGGAAGCGGTCCAGTACAAAACCC | |
| | AAGTGCTAGCAAAAGAACAGGCAGCATGGGTTCTGCATTCCACCA | |
| | ACTATTACATTAAGGTTCGTGCCGGTGACAATAAGTATATGCACCT | |
| | GAAAGTGTTCAACGGCCCGTTTCATTACCTGCATCATACCCGTTCT | |
| | GCGGACCGTGTTCTGACCGGTTACCAGGTTGACAAGAACAAAGAT | |
| | GACGAGCTGACGGGTTTC | |
| FcRn-56 | ATGATCCCGCGTGGCCTGTCTGAAGCTAAACCAGCAACTCCGGAAA | 943 |
| | TTCAAGAGATCGTCGATAAGGTGAAACCGCAGCTGGAAGAGAAAA | |
| | CGAACGAAACCTACGGTAAGCTGGAAGCGGTCCAGTACAAAACCC | |
| | AAGTGCTAGCACATCTGCAGGCACCACGTAACGCATACTCCACCAA | |
| | CTATTACATTAAGGTTCGTGCCGGTGACAATAAGTATATGCACCTG | |
| | AAAGTGTTCAACGGCCCGAAAGGTTGGCGTAACACCCATCATAAA | |
| | GCGGACCGTGTTCTGACCGGTTACCAGGTTGACAAGAACAAAGAT | |
| | GACGAGCTGACGGGTTTC | |
| FcRn-57 | ATGATCCCGCGTGGCCTGTCTGAAGCTAAACCAGCAACTCCGGAAA | 944 |
| | TTCAAGAGATCGTCGATAAGGTGAAACCGCAGCTGGAAGAGAAAA | |
| | CGAACGAAACCTACGGTAAGCTGGAAGCGGTCCAGTACAAAACCC | |
| | AAGTGCTAGCAGGTCTGACCCATCGTTGGCGTCCACATTCCACCAA | |
| | CTATTACATTAAGGTTCGTGCCGGTGACAATAAGTATATGCACCTG | |
| | AAAGTGTTCAACGGCCCGATCTGGTCTGCACGTTCTGATAAACTGG | |
| | CGGACCGTGTTCTGACCGGTTACCAGGTTGACAAGAACAAAGATG | |
| | ACGAGCTGACGGGTTTC | |
| FcRn-58 | ATGATCCCGCGTGGCCTGTCTGAAGCTAAACCAGCAACTCCGGAAA | 945 |
| | TTCAAGAGATCGTCGATAAGGTGAAACCGCAGCTGGAAGAGAAAA | |
| | CGAACGAAACCTACGGTAAGCTGGAAGCGGTCCAGTACAAAACCC | |
| | AAGTGCTAGCATCTCATCATCGTGCAACCGATCAGGTTTCCACCAA | |
| | CTATTACATTAAGGTTCGTGCCGGTGACAATAAGTATATGCACCTG | |
| | AAAGTGTTCAACGGCCCGAAAGCATACCATACCTACTGGCATCATG | |
| | CGGACCGTGTTCTGACCGGTTACCAGGTTGACAAGAACAAAGATG | |
| | ACGAGCTGACGGGTTTC | |
| FcRn-59 | ATGATCCCGCGTGGCCTGTCTGAAGCTAAACCAGCAACTCCGGAAA | 946 |
| | TTCAAGAGATCGTCGATAAGGTGAAACCGCAGCTGGAAGAGAAAA | |
| | CGAACGAAACCTACGGTAAGCTGGAAGCGGTCCAGTACAAAACCC | |
| | AAGTGCTAGCAAACAAATGGCATATCCGTTTTGCAACCTCCACCAA | |
| | CTATTACATTAAGGTTCGTGCCGGTGACAATAAGTATATGCACCTG | |
| | AAAGTGTTCAACGGCCCGTTTGCACAGGCACATCATCATACCCAGG | |
| | CGGACCGTGTTCTGACCGGTTACCAGGTTGACAAGAACAAAGATG | |
| | ACGAGCTGACGGGTTTC | |
| FcRn-60 | ATGATCCCGCGTGGCCTGTCTGAAGCTAAACCAGCAACTCCGGAAA | 947 |
| | TTCAAGAGATCGTCGATAAGGTGAAACCGCAGCTGGAAGAGAAAA | |
| | CGAACGAAACCTACGGTAAGCTGGAAGCGGTCCAGTACAAAACCC | |
| | AAGTGCTAGCACATATCCGTGATTCTCTGTGGATCACCTCCACCAA | |
| | CTATTACATTAAGGTTCGTGCCGGTGACAATAAGTATATGCACCTG | |
| | AAAGTGTTCAACGGCCCGAACTGGCAGTGGATCCCACATTGGGCA | |
| | GCGGACCGTGTTCTGACCGGTTACCAGGTTGACAAGAACAAAGAT | |
| | GACGAGCTGACGGGTTTC | |
| FcRn-61 | ATGATCCCGCGTGGCCTGTCTGAAGCTAAACCAGCAACTCCGGAAA | 948 |
| | TTCAAGAGATCGTCGATAAGGTGAAACCGCAGCTGGAAGAGAAAA | |
| | CGAACGAAACCTACGGTAAGCTGGAAGCGGTCCAGTACAAAACCC | |
| | AAGTGCTAGCATACCATATCTCTCTGTCTTTTCGTGAATCCACCAAC | |
| | TATTACATTAAGGTTCGTGCCGGTGACAATAAGTATATGCACCTGA | |
| | AAGTGTTCAACGGCCCGAAACTGGATACCCTGGGTCAGCAGCGTG | |
| | CGGACCGTGTTCTGACCGGTTACCAGGTTGACAAGAACAAAGATG | |
| | ACGAGCTGACGGGTTTC | |
| FcRn-62 | ATGATCCCGCGTGGCCTGTCTGAAGCTAAACCAGCAACTCCGGAAA | 949 |
| | TTCAAGAGATCGTCGATAAGGTGAAACCGCAGCTGGAAGAGAAAA | |
| | CGAACGAAACCTACGGTAAGCTGGAAGCGGTCCAGTACAAAACCC | |
| | AAGTGCTAGCAATCCATTGGGCAGGTTTTTTTCGTGGTTCCACCAA | |
| | CTATTACATTAAGGTTCGTGCCGGTGACAATAAGTATATGCACCTG | |
| | AAAGTGTTCAACGGCCCGTGGGAATGGGAACGTCATTGGCTGGCA | |
| | GCGGACCGTGTTCTGACCGGTTACCAGGTTGACAAGAACAAAGAT | |
| | GACGAGCTGACGGGTTTC | |
| FcRn-63 | ATGATCCCGCGTGGCCTGTCTGAAGCTAAACCAGCAACTCCGGAAA | 950 |
| | TTCAAGAGATCGTCGATAAGGTGAAACCGCAGCTGGAAGAGAAAA | |
| | CGAACGAAACCTACGGTAAGCTGGAAGCGGTCCAGTACAAAACCC | |
| | AAGTGCTAGCATACTACTCTGAACGTCATTTTTACAAATCCACCAA | |
| | CTATTACATTAAGGTTCGTGCCGGTGACAATAAGTATATGCACCTG | |
| | AAAGTGTTCAACGGCCCGTTTACCCTGGGTCGTGAAGGTTGGTTTG | |
| | CGGACCGTGTTCTGACCGGTTACCAGGTTGACAAGAACAAAGATG | |
| | ACGAGCTGACGGGTTTC | |
| FcRn-64 | ATGATCCCGCGTGGCCTGTCTGAAGCTAAACCAGCAACTCCGGAAA | 951 |
| | TTCAAGAGATCGTCGATAAGGTGAAACCGCAGCTGGAAGAGAAAA | |
| | CGAACGAAACCTACGGTAAGCTGGAAGCGGTCCAGTACAAAACCC | |
| | AAGTGCTAGCACGTCAGCAGCAGGTTCATGTTCCATCTTCCACCAA | |
| | CTATTACATTAAGGTTCGTGCCGGTGACAATAAGTATATGCACCTG | |
| | AAAGTGTTCAACGGCCCGTACCGTGGTAACACCTTTAAAATCTGGG | |
| | CGGACCGTGTTCTGACCGGTTACCAGGTTGACAAGAACAAAGATG | |
| | ACGAGCTGACGGGTTTC | |
| FcRn-65 | ATGATCCCGCGTGGCCTGTCTGAAGCTAAACCAGCAACTCCGGAAA | 952 |
| | TTCAAGAGATCGTCGATAAGGTGAAACCGCAGCTGGAAGAGAAAA | |
| | CGAACGAAACCTACGGTAAGCTGGAAGCGGTCCAGTACAAAACCC | |
| | AAGTGCTAGCAACCAAAAAAAACCAGCTGCAGGGTCATTCCACCA | |
| | ACTATTACATTAAGGTTCGTGCCGGTGACAATAAGTATATGCACCT | |
| | GAAAGTGTTCAACGGCCCGGTTCATTCTCTGCTGCAGCATCATGAT | |
| | GCGGACCGTGTTCTGACCGGTTACCAGGTTGACAAGAACAAAGAT | |
| | GACGAGCTGACGGGTTTC | |
| FcRn-66 | ATGATCCCGCGTGGCCTGTCTGAAGCTAAACCAGCAACTCCGGAAA | 953 |
| | TTCAAGAGATCGTCGATAAGGTGAAACCGCAGCTGGAAGAGAAAA | |
| | CGAACGAAACCTACGGTAAGCTGGAAGCGGTCCAGTACAAAACCC | |
| | AAGTGCTAGCACGTGATATCCATCATCATCATCATTGGTCCACCAA | |
| | CTATTACATTAAGGTTCGTGCCGGTGACAATAAGTATATGCACCTG | |
| | AAAGTGTTCAACGGCCCGTACATCAAACGTCATTGGTCTAACTTTG | |
| | CGGACCGTGTTCTGACCGGTTACCAGGTTGACAAGAACAAAGATG | |
| | ACGAGCTGACGGGTTTC | |
| FcRn-67 | ATGATCCCGCGTGGCCTGTCTGAAGCTAAACCAGCAACTCCGGAAA | 954 |
| | TTCAAGAGATCGTCGATAAGGTGAAACCGCAGCTGGAAGAGAAAA | |
| | CGAACGAAACCTACGGTAAGCTGGAAGCGGTCCAGTACAAAACCC | |
| | AAGTGCTAGCACAGCGTCAGTACACCACCAAGGTTCTGTCCACCAA | |
| | CTATTACATTAAGGTTCGTGCCGGTGACAATAAGTATATGCACCTG | |
| | AAAGTGTTCAACGGCCCGGATAACGAACGTAACCAGGTTGAATCT | |
| | GCGGACCGTGTTCTGACCGGTTACCAGGTTGACAAGAACAAAGAT | |
| | GACGAGCTGACGGGTTTC | |
| FcRn-68 | ATGATCCCGCGTGGCCTGTCTGAAGCTAAACCAGCAACTCCGGAAA | 955 |
| | TTCAAGAGATCGTCGATAAGGTGAAACCGCAGCTGGAAGAGAAAA | |
| | CGAACGAAACCTACGGTAAGCTGGAAGCGGTCCAGTACAAAACCC | |
| | AAGTGCTAGCATACTGGGATTGGCGTTTTGTTGAATGGTCCACCAA | |
| | CTATTACATTAAGGTTCGTGCCGGTGACAATAAGTATATGCACCTG | |
| | AAAGTGTTCAACGGCCCGATCGGTTACGAACTGTTTACCGTTAAAG | |
| | CGGACCGTGTTCTGACCGGTTACCAGGTTGACAAGAACAAAGATG | |
| | ACGAGCTGACGGGTTTC | |
| FcRn-69 | ATGATCCCGCGTGGCCTGTCTGAAGCTAAACCAGCAACTCCGGAAA | 956 |
| | TTCAAGAGATCGTCGATAAGGTGAAACCGCAGCTGGAAGAGAAAA | |
| | CGAACGAAACCTACGGTAAGCTGGAAGCGGTCCAGTACAAAACCC | |
| | AAGTGCTAGCAGGTTTTTCTAAACCATTTAAATGGTACTCCACCAA | |
| | CTATTACATTAAGGTTCGTGCCGGTGACAATAAGTATATGCACCTG | |
| | AAAGTGTTCAACGGCCCGTACCGTGCATGGATCCATTGGACCTCTG | |
| | CGGACCGTGTTCTGACCGGTTACCAGGTTGACAAGAACAAAGATG | |
| | ACGAGCTTACGGGTTTC | |
| FcRn-70 | ATGATCCCGCGTGGCCTGTCTGAAGCTAAACCAGCAACTCCGGAAA | 957 |
| | TTCAAGAGATCGTCGATAAGGTGAAACCGCAGCTGGAAGAGAAAA | |
| | CGAACGAAACCTACGGTAAGCTGGAAGCGGTCCAGTACAAAACCC | |
| | AAGTGCTAGCAATCTTTCAGGAACGTCTGGCAGGTCAGTCCACCAA | |
| | CTATTACATTAAGGTTCGTGCCGGTGACAATAAGTATATGCACCTG | |
| | AAAGTGTTCAACGGCCCGCAGATCAAACATTCTCATCATGCATGGG | |
| | CGGACCGTGTTCTGACCGGTTACCAGGTTGACAAGAACAAAGATG | |
| | ACGAGCTGACGGGTTTC | |
| FcRn-71 | ATGATCCCGCGTGGCCTGTCTGAAGCTAAACCAGCAACTCCGGAAA | 958 |
| | TTCAAGAGATCGTCGATAAGGTGAAACCGCAGCTGGAAGAGAAAA | |
| | CGAACGAAACCTACGGTAAGCTGGAAGCGGTCCAGTACAAAACCC | |
| | AAGTGCTAGCAAAATACGATCATCATACCCAGTCTCTGTCCACCAA | |
| | CTATTACATTAAGGTTCGTGCCGGTGACAATAAGTATATGCACCTG | |
| | AAAGTGTTCAACGGCCCGGTTTACGCATGGTACTGGGATAAATGGG | |
| | CGGACCGTGTTCTGACCGGTTACCAGGTTGACAAGAACAAAGATG | |
| | ACGAGCTGACGGGTTTC | |
| FcRn-72 | ATGATCCCGCGTGGCCTGTCTGAAGCTAAACCAGCAACTCCGGAAA | 959 |
| | TTCAAGAGATCGTCGATAAGGTGAAACCGCAGCTGGAAGAGAAAA | |
| | CGAACGAAACCTACGGTAAGCTGGAAGCGGTCCAGTACAAAACCC | |
| | AAGTGCTAGCAAAACATGCACATACCCCATTTGGTCCATCCACCAA | |
| | CTATTACATTAAGGTTCGTGCCGGTGACAATAAGTATATGCACCTG | |
| | AAAGTGTTCAACGGCCCGGCAGTTTGGTGGGATGGTCGTGGTTGGG | |
| | CGGACCGTGTTCTGACCGGTTACCAGGTTGACAAGAACAAAGATG | |
| | ACGAGCTGACGGGTTTC | |
| FcRn-73 | ATGATCCCGCGTGGCCTGTCTGAAGCTAAACCAGCAACTCCGGAAA | 960 |
| | TTCAAGAGATCGTCGATAAGGTGAAACCGCAGCTGGAAGAGAAAA | |
| | CGAACGAAACCTACGGTAAGCTGGAAGCGGTCCAGTACAAAACCC | |
| | AAGTGCTAGCATCTCTGTCTCGTTGGCTGTGGGCAGAATCCACCAA | |
| | CTATTACATTAAGGTTCGTGCCGGTGACAATAAGTATATGCACCTG | |
| | AAAGTGTTCAACGGCCCGTGGCATACCCATAAACATTACCAGAAA | |
| | GCGGACCGTGTTCTGACCGGTTACCAGGTTGACAAGAACAAAGAT | |
| | GACGAGCTGACGGGTTTC | |
| FcRn-74 | ATGATCCCGCGTGGCCTGTCTGAAGCTAAACCAGCAACTCCGGAAA | 961 |
| | TTCAAGAGATCGTCGATAAGGTGAAACCGCAGCTGGAAGAGAAAA | |
| | CGAACGAAACCTACGGTAAGCTGGAAGCGGTCCAGTACAAAACCC | |
| | AAGTGCTAGCACATCAGCAGCATACCCAGCGTTACCGTTCCACCAA | |
| | CTATTACATTAAGGTTCGTGCCGGTGACAATAAGTATATGCACCTG | |
| | AAAGTGTTCAACGGCCCGGCAAAACTGCAGTTTGGTCATAAACATG | |
| | CGGACCGTGTTCTGACCGGTTACCAGGTTGACAAGAACAAAGATG | |
| | ACGAGCTGACGGGTTTC | |
| FcRn-75 | ATGATCCCGCGTGGCCTGTCTGAAGCTAAACCAGCAACTCCGGAAA | 962 |
| | TTCAAGAGATCGTCGATAAGGTGAAACCGCAGCTGGAAGAGAAAA | |
| | CGAACGAAACCTACGGTAAGCTGGAAGCGGTCCAGTACAAAACCC | |
| | AAGTGCTAGCACATACCATCTCTCAGCATGTTTCCACCAACTATTA | |
| | CATTAAGGTTCGTGCCGGTGACAATAAGTATATGCACCTGAAAGTG | |
| | TTCAACGGCCCGCCAATCTCTTTTCGTTGGCATCGTTTTGCGGACCG | |
| | TGTTCTGACCGGTTACCAGGTTGACAAGAACAAAGATGACGAGCT | |
| | GACGGGTTTC | |
| FcRn-76 | ATGATCCCGCGTGGCCTGTCTGAAGCTAAACCAGCAACTCCGGAAA | 963 |
| | TTCAAGAGATCGTCGATAAGGTGAAACCGCAGCTGGAAGAGAAAA | |
| | CGAACGAAACCTACGGTAAGCTGGAAGCGGTCCAGTACAAAACCC | |
| | AAGTGCTAGCAGATCAGTGGACCTGGGCACATTCTCGTTCCACCAA | |
| | CTATTACATTAAGGTTCGTGCCGGTGACAATAAGTATATGCACCTG | |
| | AAAGTGTTCAACGGCCCGGATTACCATCTGCGTCATCATAACCATG | |
| | CGGACCGTGTTCTGACCGGTTACCAGGTTGACAAGAACAAAGATG | |
| | ACGAGCTGACGGGTTTC | |
| FcRn-77 | ATGATCCCGCGTGGCCTGTCTGAAGCTAAACCAGCAACTCCGGAAA | 964 |
| | TTCAAGAGATCGTCGATAAGGTGAAACCGCAGCTGGAAGAGAAAA | |
| | CGAACGAAACCTACGGTAAGCTGGAAGCGGTCCAGTACAAAACCC | |
| | AAGTGCTAGCATGGTACCGTGTTTGGCGTTGGGTTTGGTCCACCAA | |
| | CTATTACATTAAGGTTCGTGCCGGTGACAATAAGTATATGCACCTG | |
| | AAAGTGTTCAACGGCCCGGTTTACAAATACGGTTCTGAAAACTGGG | |
| | CGGACCGTGTTCTGACCGGTTACCAGGTTGACAAGAACAAAGATG | |
| | ACGAGCTGACGGGTTTC | |
| FcRn-78 | ATGATCCCGCGTGGCCTGTCTGAAGCTAAACCAGCAACTCCGGAAA | 965 |
| | TTCAAGAGATCGTCGATAAGGTGAAACCGCAGCTGGAAGAGAAAA | |
| | CGAACGAAACCTACGGTAAGCTGGAAGCGGTCCAGTACAAAACCC | |
| | AAGTGCTAGCACAGAAAGGTTCTACCCATCATAACCATTCCACCAA | |
| | CTATTACATTAAGGTTCGTGCCGGTGACAATAAGTATATGCACCTG | |
| | AAAGTGTTCAACGGCCCGGCACGTTCTCAGGCAGGTCATCATAACG | |
| | CGGACCGTGTTCTGACCGGTTACCAGGTTGACAAGAACAAAGATG | |
| | ACGAGCTGACGGGTTTC | |
| FcRn-79 | ATGATCCCGCGTGGCCTGTCTGAAGCTAAACCAGCAACTCCGGAAA | 966 |
| | TTCAAGAGATCGTCGATAAGGTGAAACCGCAGCTGGAAGAGAAAA | |
| | CGAACGAAACCTACGGTAAGCTGGAAGCGGTCCAGTACAAAACCC | |
| | AAGTGCTAGCACCAGAAGGTCGTGCAGGTGAACCATCTTCCACCA | |
| | ACTATTACATTAAGGTTCGTGCCGGTGACAATAAGTATATGCACCT | |
| | GAAAGTGTTCAACGGCCCGGAACATTGGTGGTTTACCTTTGGTGAT | |
| | GCGGACCGTGTTCTGACCGGTTACCAGGTTGACAAGAACAAAGAT | |
| | GACGAGCTGACGGGTTTC | |
| FcRn-80 | ATGATCCCGCGTGGCCTGTCTGAAGCTAAACCAGCAACTCCGGAAA | 967 |
| | TTCAAGAGATCGTCGATAAGGTGAAACCGCAGCTGGAAGAGAAAA | |
| | CGAACGAAACCTACGGTAAGCTGGAAGCGGTCCAGTACAAAACCC | |
| | AAGTGCTAGCACATACCCGTCATCATGTTACCCTGTGGTCCACCAA | |
| | CTATTACATTAAGGTTCGTGCCGGTGACAATAAGTATATGCACCTG | |
| | AAAGTTTTCAACGGCCCGGGTTGGAAATACGCACCACAGGTTTGGG | |
| | CGGACCGTGTTCTGACCGGTTACCAGGTTGACAAGAACAAAGATG | |
| | ACGAGCTGACGGGTTTC | |
| FcRn-81 | ATGATCCCGCGTGGCCTGTCTGAAGCTAAACCAGCAACTCCGGAAA | 968 |
| | TTCAAGAGATCGTCGATAAGGTGAAACCGCAGCTGGAAGAGAAAA | |
| | CGAACGAAACCTACGGTAAGCTGGAAGCGGTCCAGTACAAAACCC | |
| | AAGTGCTAGCACAGCGGTACTACAAACATGAATACCGTTCCACCA | |
| | ACTATTACATTAAGGTTCGTGCCGGTGACAATAAGTATATGCACCT | |
| | GAAAGTGTTCAACGGCCCGTACTTTAAACTGCCACCATGGGAAGA | |
| | AGCGGACCGTGTTCTGACCGGTTACCAGGTTGACAAGAACAAAGA | |
| | TGACGAGCTGACGGGTTTC | |
| FcRn-82 | ATGATCCCGCGTGGCCTGTCTGAAGCTAAACCAGCAACTCCGGAAA | 969 |
| | TTCAAGAGATCGTCGATAAGGTGAAACCGCAGCTGGAAGAGAAAA | |
| | CGAACGAAACCTACGGTAAGCTGGAAGCGGTCCAGTACAAAACCC | |
| | AAGTGCTAGCACAGTGGTTTCATCGTCGTGAAGTTAAATCCACCAA | |
| | CTATTACATTAAGGTTCGTGCCGGTGACAATAAGTATATGCACCTG | |
| | AAAGTGTTCAACGGCCCGCCAGTTCATCTGCATCATAAACAGCATG | |
| | CGGACCGTGTTCTGACCGGTTACCAGGTTGACAAGAACAAAGATG | |
| | ACGAGCTGACGGGTTTC | |
| FcRn-83 | ATGATCCCGCGTGGCCTGTCTGAAGCTAAACCAGCAACTCCGGAAA | 970 |
| | TTCAAGAGATCGTCGATAAGGTGAAACCGCAGCTGGAAGAGAAAA | |
| | CGAACGAAACCTACGGTAAGCTGGAAGCGGTCCAGTACAAAACCC | |
| | AAGTGCTAGCACATCATCTGCATGCAACCCAGCCACCATCCACCAA | |
| | CTATTACATTAAGGTTCGTGCCGGTGACAATAAGTATATGCACCTG | |
| | AAAGTGTTCAACGGCCCGAACTGGCATATCATCAACAAATACGAT | |
| | GCGGACCGTGTTCTGACCGGTTACCAGGTTGACAAGAACAAAGAT | |
| | GACGAGCTGACGGGTTTC | |
| FcRn-84 | ATGATCCCGCGTGGCCTGTCTGAAGCTAAACCAGCAACTCCGGAAA | 971 |
| | TTCAAGAGATCGTCGATAAGGTGAAACCGCAGCTGGAAGAGAAAA | |
| | CGAACGAAACCTACGGTAAGCTGGAAGCGGTCCAGTACAAAACCC | |
| | AAGTGCTAGCAAAACATTGGCATCAGCCAGTTGCAAAATCCACCA | |
| | ACTATTACATTAAGGTTCGTGCCGGTGACAATAAGTATATGCACCT | |
| | GAAAGTGTTCAACGGCCCGGCACATTGGCATGATTGGGTTGCGGAC | |
| | CGTGTTCTGACCGGTTACCAGGTTGACAAGAACAAAGATGACGAG | |
| | CTGACGGGTTTC | |
| FcRn-85 | ATGATCCCGCGTGGCCTGTCTGAAGCTAAACCAGCAACTCCGGAAA | 972 |
| | TTCAAGAGATCGTCGATAAGGTGAAACCGCAGCTGGAAGAGAAAA | |
| | CGAACGAAACCTACGGTAAGCTGGAAGCGGTCCAGTACAAAACCC | |
| | AAGTGCTAGCATACACCACCTCTCATTGGACCATCGGTTCCACCAA | |
| | CTATTACATTAAGGTTCGTGCCGGTGACAATAAGTATATGCACCTG | |
| | AAAGTGTTCAACGGCCCGGATCATCATCATGTTCAGAAATCTCATG | |
| | CGGACCGTGTTCTGACCGGTTACCAGGTTGACAAGAACAAAGATG | |
| | ACGAGCTGACGGGTTTC | |
| FcRn-86 | ATGATCCCGCGTGGCCTGTCTGAAGCTAAACCAGCAACTCCGGAAA | 973 |
| | TTCAAGAGATCGTCGATAAGGTGAAACCGCAGCTGGAAGAGAAAA | |
| | CGAACGAAACCTACGGTAAGCTGGAAGCGGTCCAGTACAAAACCC | |
| | AAGTGCTAGCAGAACATCATCATACCCAGCTGTCTAACTCCACCAA | |
| | CTATTACATTAAGGTTCGTGCCGGTGACAATAAGTATATGCACCTG | |
| | AAAGTGTTCAACGGCCCGAAATTTTGGCAGGTTCAGCAGAAATAC | |
| | GCGGACCGTGTTCTGACCGGTTACCAGGTTGACAAGAACAAAGAT | |
| | GACGAGCTGACGGGTTTC | |
| FcRn-87 | ATGATCCCGCGTGGCCTGTCTGAAGCTAAACCAGCAACTCCGGAAA | 974 |
| | TTCAAGAGATCGTCGATAAGGTGAAACCGCAGCTGGAAGAGAAAA | |
| | CGAACGAAACCTACGGTAAGCTGGAAGCGGTCCAGTACAAAACCC | |
| | AAGTGCTAGCACATAAACCACATAACTCTAAACAGATCTCCACCAA | |
| | CTATTACATTAAGGTTCGTGCCGGTGACAATAAGTATATGCACCTG | |
| | AAAGTGTTCAACGGCCCGAAACCACGTTTTAACATCCATCATCATG | |
| | CGGACCGTGTTCTGACCGGTTACCAGGTTGACAAGAACAAAGATG | |
| | ACGAGCTGACGGGTTTC | |
| FcRn-88 | ATGATCCCGCGTGGCCTGTCTGAAGCTAAACCAGCAACTCCGGAAA | 975 |
| | TTCAAGAGATCGTCGATAAGGTGAAACCGCAGCTGGAAGAGAAAA | |
| | CGAACGAAACCTACGGTAAGCTGGAAGCGGTCCAGTACAAAACCC | |
| | AAGTGCTAGCACATCATACCAAACATCATTCTCGTTGGTCCACCAA | |
| | CTATTACATTAAGGTTCGTGCCGGTGACAATAAGTATATGCACCTG | |
| | AAAGTGTTCAACGGCCCGGTTAACCATATCTCTCATGCACCAATCG | |
| | CGGACCGTGTTCTGACCGGTTACCAGGTTGACAAGAACAAAGATG | |
| | ACGAGCTGACGGGTTTC | |
| FcRn-89 | ATGATCCCGCGTGGCCTGTCTGAAGCTAAACCAGCAACTCCGGAAA | 976 |
| | TTCAAGAGATCGTCGATAAGGTGAAACCGCAGCTGGAAGAGAAAA | |
| | CGAACGAAACCTACGGTAAGCTGGAAGCGGTCCAGTACAAAACCC | |
| | AAGTGCTAGCATTTCATCGTCATCATCCAATCTGGCATTCCACCAA | |
| | CTATTACATTAAGGTTCGTGCCGGTGACAATAAGTATATGCACCTG | |
| | AAAGTGTTCAACGGCCCGCTGAAACCATGGGAAGCAGATCTGTGG | |
| | GCGGACCGTGTTCTGACCGGTTACCAGGTTGACAAGAACAAAGAT | |
| | GACGAGCTGACGGGTTTC | |
| FcRn-90 | ATGATCCCGCGTGGCCTGTCTGAAGCTAAACCAGCAACTCCGGAAA | 977 |
| | TTCAAGAGATCGTCGATAAGGTGAAACCGCAGCTGGAAGAGAAAA | |
| | CGAACGAAACCTACGGTAAGCTGGAAGCGGTCCAGTACAAAACCC | |
| | AAGTGCTAGCAGCACGTGTTACCATCGATTGGAAAGCATCCACCAA | |
| | CTATTACATTAAGGTTCGTGCCGGTGACAATAAGTATATGCACCTG | |
| | AAAGTGTTCAACGGCCCGTACAAATACCCAAACATCCATCCACATG | |
| | CGGACCGTGTTCTGACCGGTTACCAGGTTGACAAGAACAAAGATG | |
| | ACGAGCTGACGGGTTTC | |
| FcRn-91 | ATGATCCCGCGTGGCCTGTCTGAAGCTAAACCAGCAACTCCGGAAA | 978 |
| | TTCAAGAGATCGTCGATAAGGTGAAACCGCAGCTGGAAGAGAAAA | |
| | CGAACGAAACCTACGGTAAGCTGGAAGCGGTCCAGTACAAAACCC | |
| | AAGTGCTAGCAAAACTGGAACAGCGTCGTTCTCATTACTCCACCAA | |
| | CTATTACATTAAGGTTCGTGCCGGTGACAATAAGTATATGCACCTG | |
| | AAAGTGTTCAACGGCCCGCCAAAATCTCTGTTTAACTACCAGCATG | |
| | CGGACCGTGTTCTGACCGGTTACCAGGTTGACAAGAACAAAGATG | |
| | ACGAGCTGACGGGTTTC | |
| FcRn-92 | ATGATCCCGCGTGGCCTGTCTGAAGCTAAACCAGCAACTCCGGAAA | 979 |
| | TTCAAGAGATCGTCGATAAGGTGAAACCGCAGCTGGAAGAGAAAA | |
| | CGAACGAAACCTACGGTAAGCTGGAAGCGGTCCAGTACAAAACCC | |
| | AAGTGCTAGCAAACATCCATCATGTTCATCATCAGCAGTCCACCAA | |
| | CTATTACATTAAGGTTCGTGCCGGTGACAATAAGTATATGCACCTG | |
| | AAAGTGTTCAACGGCCCGGATGGTGAATTTCATGTTAAACAGGTTG | |
| | CGGACCGTGTTCTGACCGGTTACCAGGTTGACAAGAACAAAGATG | |
| | ACGAGCTGACGGGTTTC | |
| FcRn-93 | ATGATCCCGCGTGGCCTGTCTGAAGCTAAACCAGCAACTCCGGAAA | 980 |
| | TTCAAGAGATCGTCGATAAGGTGAAACCGCAGCTGGAAGAGAAAA | |
| | CGAACGAAACCTACGGTAAGCTGGAAGCGGTCCAGTACAAAACCC | |
| | AAGTGCTAGCATCTCATCATACCATCGCATGGTACGTTTCCACCAA | |
| | CTATTACATTAAGGTTCGTGCCGGTGACAATAAGTATATGCACCTG | |
| | AAAGTGTTCAACGGCCCGGTTTACCCAAAACGTCAGCAGGTTGAA | |
| | GCGGACCGTGTTCTGACCGGTTACCAGGTTGACAAGAACAAAGAT | |
| | GACGAGCTGACGGGTTTC | |
| FcRn-94 | ATGATCCCGCGTGGCCTGTCTGAAGCTAAACCAGCAACTCCGGAAA | 981 |
| | TTCAAGAGATCGTCGATAAGGTGAAACCGCAGCTGGAAGAGAAAA | |
| | CGAACGAAACCTACGGTAAGCTGGAAGCGGTCCAGTACAAAACCC | |
| | AAGTGCTAGCACATCATCAGCCATACTACGGTTGGCAGTCCACCAA | |
| | CTATTACATTAAGGTTCGTGCCGGTGACAATAAGTATATGCACCTG | |
| | AAAGTGTTCAACGGCCCGATCATCGATCGTTCTAAAATCGAAAAAG | |
| | CGGACCGTGTTCTGACCGGTTACCAGGTTGACAAGAACAAAGATG | |
| | ACGAGCTGACGGGTTTC | |
| FcRn-95 | ATGATCCCGCGTGGCCTGTCTGAAGCTAAACCAGCAACTCCGGAAA | 982 |
| | TTCAAGAGATCGTCGATAAGGTGAAACCGCAGCTGGAAGAGAAAA | |
| | CGAACGAAACCTACGGTAAGCTGGAAGCGGTCCAGTACAAAACCC | |
| | AAGTGCTAGCAGTTCATCGTTCTCATCATCCAATCAAATCCACCAA | |
| | CTATTACATTAAGGTTCGTGCCGGTGACAATAAGTATATGCACCTG | |
| | AAAGTGTTCAACGGCCCGTCTATCCATTCTTCTTGGAAAAAACAGG | |
| | CGGACCGTGTTCTGACCGGTTACCAGGTTGACAAGAACAAAGATG | |
| | ACGAGCTGACGGGTTTC | |
| FcRn-96 | ATGATCCCGCGTGGCCTGTCTGAAGCTAAACCAGCAACTCCGGAAA | 983 |
| | TTCAAGAGATCGTCGATAAGGTGAAACCGCAGCTGGAAGAGAAAA | |
| | CGAACGAAACCTACGGTAAGCTGGAAGCGGTCCAGTACAAAACCC | |
| | AAGTGCTAGCATGGTGGTCTCAGCGTGTTAAACTGTTTTCCACCAA | |
| | CTATTACATTAAGGTTCGTGCCGGTGACAATAAGTATATGCACCTG | |
| | AAAGTGTTCAACGGCCCGAACATCCATAAAACCTGGGATCAGACC | |
| | GCGGACCGTGTTCTGACCGGTTACCAGGTTGACAAGAACAAAGAT | |
| | GACGAGCTGACGGGTTTC | |
| FcRn-97 | ATGATCCCGCGTGGCCTGTCTGAAGCTAAACCAGCAACTCCGGAAA | 984 |
| | TTCAAGAGATCGTCGATAAGGTGAAACCGCAGCTGGAAGAGAAAA | |
| | CGAACGAAACCTACGGTAAGCTGGAAGCGGTCCAGTACAAAACCC | |
| | AAGTGCTAGCACATTACTGGAAACCACATGATATCCATTCCACCAA | |
| | CTATTACATTAAGGTTCGTGCCGGTGACAATAAGTATATGCACCTG | |
| | AAAGTGTTCAACGGCCCGGGTAAAGTTCCATTTCATGCATTTCATA | |
| | AAGCGGACCGTGTTCTGACCGGTTACCAGGTTGACAAGAACAAAG | |
| | ATGACGAGCTGACGGGTTTC | |
| FcRn-98 | ATGATCCCGCGTGGCCTGTCTGAAGCTAAACCAGCAACTCCGGAAA | 985 |
| | TTCAAGAGATCGTCGATAAGGTGAAACCGCAGCTGGAAGAGAAAA | |
| | CGAACGAAACCTACGGTAAGCTGGAAGCGGTCCAGTACAAAACCC | |
| | AAGTGCTAGCAACCAACCAGCCACGTCTGTACCATCAGTCCACCAA | |
| | CTATTACATTAAGGTTCGTGCCGGTGACAATAAGTATATGCACCTG | |
| | AAAGTGTTCAACGGCCCGTTTTACCGTCTGACCCATGGTCATCGTG | |
| | CGGACCGTGTTCTGACCGGTTACCAGGTTGACAAGAACAAAGATG | |
| | ACGAGCTGACGGGTTTC | |
| FcRn-99 | ATGATCCCGCGTGGCCTGTCTGAAGCTAAACCAGCAACTCCGGAAA | 986 |
| | TTCAAGAGATCGTCGATAAGGTGAAACCGCAGCTGGAAGAGAAAA | |
| | CGAACGAAACCTACGGTAAGCTGGAAGCGGTCCAGTACAAAACCC | |
| | AAGTGCTAGCATGGTCTGGTAAACTGCTGAAACATCCATCCACCAA | |
| | CTATTACATTAAGGTTCGTGCCGGTGACAATAAGTATATGCACCTG | |
| | AAAGTGTTCAACGGCCCGCATATCGATTACAAAAACGGTCGTATCT | |
| | GGGCGGACCGTGTTCTGACCGGTTACCAGGTTGACAAGAACAAAG | |
| | ATGACGAGCTGACGGGTTTC | |
| FcRn-10 | ATGATCCCGCGTGGCCTGTCTGAAGCTAAACCAGCAACTCCGGAAA | 987 |
| 0 | TTCAAGAGATCGTCGATAAGGTGAAACCGCAGCTGGAAGAGAAAA | |
| | CGAACGAAACCTACGGTAAGCTGGAAGCGGTCCAGTACAAAACCC | |
| | AAGTGCTAGCACATCGTACCTCTTGGGATCATAAAAACTCCACCAA | |
| | CTATTACATTAAGGTTCGTGCCGGTGACAATAAGTATATGCACCTG | |
| | AAAGTGTTCAACGGCCCGGTTTTTCATCATCAGCGTGGTGGTCAGG | |
| | CGGACCGTGTTCTGACCGGTTACCAGGTTGACAAGAACAAAGATG | |
| | ACGAGCTGACGGGTTTC | |
| FcRn-10 | ATGATCCCGCGTGGCCTGTCTGAAGCTAAACCAGCAACTCCGGAAA | 988 |
| 1 | TTCAAGAGATCGTCGATAAGGTGAAACCGCAGCTGGAAGAGAAAA | |
| | CGAACGAAACCTACGGTAAGCTGGAAGCGGTCCAGTACAAAACCC | |
| | AAGTGCTAGCACCACATAAACAGAAACGTCATTTTTTTAACTCCAC | |
| | CAACTATTACATTAAGGTTCGTGCCGGTGACAATAAGTATATGCAC | |
| | CTGAAAGTGTTCAACGGCCCGTGGGGTCAGTCTAAACCAGCACATG | |
| | TTGCGGACCGTGTTCTGACCGGTTACCAGGTTGACAAGAACAAAGA | |
| | TGACGAGCTGACGGGTTTC | |
| FcRn-10 | ATGATCCCGCGTGGCCTGTCTGAAGCTAAACCAGCAACTCCGGAAA | 989 |
| 2 | TTCAAGAGATCGTCGATAAGGTGAAACCGCAGCTGGAAGAGAAAA | |
| | CGAACGAAACCTACGGTAAGCTGGAAGCGGTCCAGTACAAAACCC | |
| | AAGTGCTAGCACATGATCAGCATAAACATGATTTTAAATCCACCAA | |
| | CTATTACATTAAGGTTCGTGCCGGTGACAATAAGTATATGCACCTG | |
| | AAAGTGTTCAACGGCCCGTTTCATCAGCGTTTTCCAGATCATAAAG | |
| | CGGACCGTGTTCTGACCGGTTACCAGGTTGACAAGAACAAAGATG | |
| | ACGAGCTGACGGGTTTC | |
| FcRn-10 | ATGATCCCGCGTGGCCTGTCTGAAGCTAAACCAGCAACTCCGGAAA | 990 |
| 3 | TTCAAGAGATCGTCGATAAGGTGAAACCGCAGCTGGAAGAGAAAA | |
| | CGAACGAAACCTACGGTAAGCTGGAAGCGGTCCAGTACAAAACCC | |
| | AAGTGCTAGCAAACCGTGTTGTTCATCATTTTCATCACTCCACCAA | |
| | CTATTACATTAAGGTTCGTGCCGGTGACAATAAGTATATGCACCTG | |
| | AAAGTGTTCAAAGGCCCGATCCAGGCAGCAGAAGGTTACAAACAT | |
| | GCGGACCGTGTTCTGACCGGTTACCAGGTTGACAAGAACAAAGAT | |
| | GACGAGCTGACGGGTTTC | |
| FcRn-10 | ATGATCCCGCGTGGCCTGTCTGAAGCTAAACCAGCAACTCCGGAAA | 991 |
| 4 | TTCAAGAGATCGTCGATAAGGTGAAACCGCAGCTGGAAGAGAAAA | |
| | CGAACGAAACCTACGGTAAGCTGGAAGCGGTCCAGTACAAAACCC | |
| | AAGTGCTAGCATGGCATAAAGCAATCCGTCAGCAGTTTTCCACCAA | |
| | CTATTACATTAAGGTTCGTGCCGGTGACAATAAGTATATGCACCTG | |
| | AAAGTGTTCAACGGCCCGTTTCATTACCAGTACCGTCATCAGCATG | |
| | CGGACCGTGTTCTGACCGGTTACCAGGTTGACAAGAACAAAGATG | |
| | ACGAGCTGACGGGTTTC | |
| FcRn-10 | ATGATCCCGCGTGGCCTGTCTGAAGCTAAACCAGCAACTCCGGAAA | 992 |
| 5 | TTCAAGAGATCGTCGATAAGGTGAAACCGCAGCTGGAAGAGAAAA | |
| | CGAACGAAACCTACGGTAAGCTGGAAGCGGTCCAGTACAAAACCC | |
| | AAGTGCTAGCAACCAAAGAATGGCATCAGCATATCAAATCCACCA | |
| | ACTATTACATTAAGGTTCGTGCCGGTGACAATAAGTATATGCACCT | |
| | GAAAGTGTTCAACGGCCCGAACAAATTTCTGCATGGTTTTGAAGTT | |
| | GCGGACCGTGTTCTGACCGGTTACCAGGTTGACAAGAACAAAGAT | |
| | GACGAGCTGACGGGTTTC | |
| FcRn-10 | ATGATCCCGCGTGGCCTGTCTGAAGCTAAACCAGCAACTCCGGAAA | 993 |
| 6 | TTCAAGAGATCGTCGATAAGGTGAAACCGCAGCTGGAAGAGAAAA | |
| | CGAACGAAACCTACGGTAAGCTGGAAGCGGTCCAGTACAAAACCC | |
| | AAGTGCTAGCATGGTACCATACCCATTTTGCAAACGCATCCACCAA | |
| | CTATTACATTAAGGTTCGTGCCGGTGACAATAAGTATATGCACCTG | |
| | AAAGTGTTCAACGGCCCGTTTAAACGTCATCAGCATGGTCATAAAG | |
| | CGGACCGTGTTCTGACCGGTTACCAGGTTGACAAGAACAAAGATG | |
| | ACGAGCTGACGGGTTTC | |
| FcRn-10 | ATGATCCCGCGTGGCCTGTCTGAAGCTAAACCAGCAACTCCGGAAA | 994 |
| 7 | TTCAAGAGATCGTCGATAAGGTGAAACCGCAGCTGGAAGAGAAAA | |
| | CGAACGAAACCTACGGTAAGCTGGAAGCGGTCCAGTACAAAACCC | |
| | AAGTGCTAGCAACCCGTGTTCATAACCTGTCTGTTCTGTCCACCAA | |
| | CTATTACATTAAGGTTCGTGCCGGTGACAATAAGTATATGCACCTG | |
| | AAAGTGTTCAACGGCCCGCATTACGATCGTGCACATTACTTTAAAG | |
| | CGGACCGTGTTCTGACCGGTTACCAGGTTGACAAGAACAAAGATG | |
| | ACGAGCTGACGGGTTTC | |
| FcRn-10 | ATGATCCCGCGTGGCCTGTCTGAAGCTAAACCAGCAACTCCGGAAA | 995 |
| 8 | TTCAAGAGATCGTCGATAAGGTGAAACCGCAGCTGGAAGAGAAAA | |
| | CGAACGAAACCTACGGTAAGCTGGAAGCGGTCCAGTACAAAACCC | |
| | AAGTGCTAGCATGGAACCAGCCATACTGGACCACCTACTCCACCAA | |
| | CTATTACATTAAGGTTCGTGCCGGTGACAATAAGTATATGCACCTG | |
| | AAAGTGTTCAACGGCCCGTTTCGTTGGAAATTTCATGATTACAAAG | |
| | CGGACCGTGTTCTGACCGGTTACCAGGTTGACAAGAACAAAGATG | |
| | ACGAGCTGACGGGTTTC | |
| FcRn-10 | ATGATCCCGCGTGGCCTGTCTGAAGCTAAACCAGCAACTCCGGAAA | 996 |
| 9 | TTCAAGAGATCGTCGATAAGGTGAAACCGCAGCTGGAAGAGAAAA | |
| | CGAACGAAACCTACGGTAAGCTGGAAGCGGTCCAGTACAAAACCC | |
| | AAGTGCTAGCACGTCCACATAACCGTGATTCTCATCGTTCCACCAA | |
| | CTATTACATTAAGGTTCGTGCCGGTGACAATAAGTATATGCACCTG | |
| | AAAGTGTTCAACGGCCCGGATCGTAAACATCGTAAACATTGGCATG | |
| | CGGACCGTGTTCTGACCGGTTACCAGGTTGACAAGAACAAAGATG | |
| | ACGAGCTGACGGGTTTC | |
| FcRn-11 | ATGATCCCGCGTGGCCTGTCTGAAGCTAAACCAGCAACTCCGGAAA | 997 |
| 0 | TTCAAGAGATCGTCGATAAGGTGAAACCGCAGCTGGAAGAGAAAA | |
| | CGAACGAAACCTACGGTAAGCTGGAAGCGGTCCAGTACAAAACCC | |
| | AAGTGCTAGCAGGTCATCCACGTCATCATTGGAAATACTCCACCAA | |
| | CTATTACATTAAGGTTCGTGCCGGTGACAATAAGTATATGCACCTG | |
| | AAAGTGTTCAACGGCCCGGCAACCTACAAATACCGTGTTGATTACG | |
| | CGGACCGTGTTCTGACCGGTTACCAGGTTGACAAGAACAAAGATG | |
| | ACGAGCTGACGGGTTTC | |
| FcRn-11 | ATGATCCCGCGTGGCCTGTCTGAAGCTAAACCAGCAACTCCGGAAA | 998 |
| 1 | TTCAAGAGATCGTCGATAAGGTGAAACCGCAGCTGGAAGAGAAAA | |
| | CGAACGAAACCTACGGTAAGCTGGAAGCGGTCCAGTACAAAACCC | |
| | AAGTGCTAGCATACCCAGGTCATCATCATGCACGTGATTCCACCAA | |
| | CTATTACATTAAGGTTCGTGCCGGTGACAATAAGTATATGCACCTG | |
| | AAAGTGTTCAACGGCCCGTACTTTTACCATCATCATTGGTTTAAAG | |
| | CGGACCGTGTTCTGACCGGTTACCAGGTTGACAAGAACAAAGATG | |
| | ACGAGCTGACGGGTTTC | |
| FcRn-11 | ATGATCCCGCGTGGCCTGTCTGAAGCTAAACCAGCAACTCCGGAAA | 999 |
| 2 | TTCAAGAGATCGTCGATAAGGTGAAACCGCAGCTGGAAGAGAAAA | |
| | CGAACGAAACCTACGGTAAGCTGGAAGCGGTCCAGTACAAAACCC | |
| | AAGTGCTAGCAATCGCAAAACATCATACCTGGCATCAGTCCACCAA | |
| | CTATTACATTAAGGTTCGTGCCGGTGACAATAAGTATATGCACCTG | |
| | AAAGTGTTCAACGGCCCGTACCGTAACCATCGTCATCATATCGTTG | |
| | CGGACCGTGTTCTGACCGGTTACCAGGTTGACAAGAACAAAGATG | |
| | ACGAGCTGACGGGTTTC | |
| FcRn-11 | ATGATCCCGCGTGGCCTGTCTGAAGCTAAACCAGCAACTCCGGAAA | 1000 |
| 3 | TTCAAGAGATCGTCGATAAGGTGAAACCGCAGCTGGAAGAGAAAA | |
| | CGAACGAAACCTACGGTAAGCTGGAAGCGGTCCAGTACAAAACCC | |
| | AAGTGCTAGCACATAACCATGGTCATTGGCATTTTCGTTCCACCAA | |
| | CTATTACATTAAGGTTCGTGCCGGTGACAATAAGTATATGCACCTG | |
| | AAAGTGTTCAACGGCCCGGTTCAGCATGCACGTCATAAACATTACG | |
| | CGGACCGTGTTCTGACCGGTTACCAGGTTGACAAGAACAAAGATG | |
| | ACGAGCTGACGGGTTTC | |
| FcRn-11 | ATGATCCCGCGTGGCCTGTCTGAAGCTAAACCAGCAACTCCGGAAA | 1001 |
| 4 | TTCAAGAGATCGTCGATAAGGTGAAACCGCAGCTGGAAGAGAAAA | |
| | CGAACGAAACCTACGGTAAGCTGGAAGCGGTCCAGTACAAAACCC | |
| | AAGTGCTAGCAAAAAAATTTGATCATTACCATCAGAAATCCACCAA | |
| | CTATTACATTAAGGTTCGTGCCGGTGACAATAAGTATATGCACCTG | |
| | AAAGTGTTCAACGGCCCGAAAGATCGTCATCATCATAACCGTGCGG | |
| | ACCGTGTTCTGACCGGTTACCAGGTTGACAAGAACAAAGATGACG | |
| | AGCTGACGGGTTTC | |
| FcRn-11 | ATGATCCCGCGTGGCCTGTCTGAAGCTAAACCAGCAACTCCGGAAA | 1002 |
| 5 | TTCAAGAGATCGTCGATAAGGTGAAACCGCAGCTGGAAGAGAAAA | |
| | CGAACGAAACCTACGGTAAGCTGGAAGCGGTCCAGTACAAAACCC | |
| | AAGTGCTAGCATCTAAAGCACATCGTGTTGAACATAAATCCACCAA | |
| | CTATTACATTAAGGTTCGTGCCGGTGACAATAAGTATATGCACCTG | |
| | AAAGTGTTCAACGGCCCGAAACAGCATCATCTGTACCATTTTAAAG | |
| | CGGACCGTGTTCTGACCGGTTACCAGGTTGACAAGAACAAAGATG | |
| | ACGAGCTGACGGGTTTC | |
| FcRn-11 | ATGATCCCGCGTGGCCTGTCTGAAGCTAAACCAGCAACTCCGGAAA | 1003 |
| 6 | TTCAAGAGATCGTCGATAAGGTGAAACCGCAGCTGGAAGAGAAAA | |
| | CGAACGAAACCTACGGTAAGCTGGAAGCGGTCCAGTACAAAACCC | |
| | AAGTGCTAGCACCAAAAAAACATTACCATCATGGTATCTCCACCAA | |
| | CTATTACATTAAGGTTCGTGCCGGTGACAATAAGTATATGCACCTG | |
| | AAAGTGTTCAACGGCCCGGTTAACTCTTTTCAGGCACATCGTCATG | |
| | CGGACCGTGTTCTGACCGGTTACCAGGTTGACAAGAACAAAGATG | |
| | ACGAGCTGACGGGTTTC | |
| FcRn-11 | ATGATCCCGCGTGGCCTGTCTGAAGCTAAACCAGCAACTCCGGAAA | 1004 |
| 7 | TTCAAGAGATCGTCGATAAGGTGAAACCGCAGCTGGAAGAGAAAA | |
| | CGAACGAAACCTACGGTAAGCTGGAAGCGGTCCAGTACAAAACCC | |
| | AAGTGCTAGCACCAAAAAAACATTACCATCATGGTATCTCCACCAA | |
| | CTATTACATTAAGGTTCGTGCCGGTGACAATAAGTATATGCACCTG | |
| | AAAGTGTTCAACGGCCCGGTTAACTCTTTTCAGGCACATCGTCATG | |
| | CGGACCGTGTTCTGACCGGTTACCAGGTTGACAAGAACAAAGATG | |
| | ACGAGCTGACGGGTTTC | |
| FcRn-11 | ATGATCCCGCGTGGCCTGTCTGAAGCTAAACCAGCAACTCCGGAAA | 1005 |
| 8 | TTCAAGAGATCGTCGATAAGGTGAAACCGCAGCTGGAAGAGAAAA | |
| | CGAACGAAACCTACGGTAAGCTGGAAGCGGTCCAGTACAAAACCC | |
| | AAGTGCTAGCACCACATCATTCTCATCATCGTCTGGAATCCACCAA | |
| | CTATTACATTAAGGTTCGTGCCGGTGACAATAAGTATATGCACCTG | |
| | AAAGTGTTCAACGGCCCGCAGCCAACCTTTCGTCATCATTACACCG | |
| | CGGACCGTGTTCTGACCGGTTACCAGGTTGACAAGAACAAAGATG | |
| | ACGAGCTGACGGGTTTC | |
| FcRn-11 | ATGATCCCGCGTGGCCTGTCTGAAGCTAAACCAGCAACTCCGGAAA | 1006 |
| 9 | TTCAAGAGATCGTCGATAAGGTGAAACCGCAGCTGGAAGAGAAAA | |
| | CGAACGAAACCTACGGTAAGCTGGAAGCGGTCCAGTACAAAACCC | |
| | AAGTGCTAGCACATGTTCATCATCATCGTGAAAAAGGTTCCACCAA | |
| | CTATTACATTAAGGTTCGTGCCGGTGACAATAAGTATATGCACCTG | |
| | AAAGTGTTCAACGGCCCGTACTCTAACTCTCGTGAACGTCAGTGGG | |
| | CGGACCGTGTTCTGACCGGTTACCAGGTTGACAAGAACAAAGATG | |
| | ACGAGCTGACGGGTTTC | |
| FcRn-12 | ATGATCCCGCGTGGCCTGTCTGAAGCTAAACCAGCAACTCCGGAAA | 1007 |
| 0 | TTCAAGAGATCGTCGATAAGGTGAAACCGCAGCTGGAAGAGAAAA | |
| | CGAACGAAACCTACGGTAAGCTGGAAGCGGTCCAGTACAAAACCC | |
| | AAGTGCTAGCAAAACATAAATACCATCATACCGGTCATTCCACCAA | |
| | CTATTACATTAAGGTTCGTGCCGGTGACAATAAGTATATGCACCTG | |
| | AAAGTGTTCAACGGCCCGGGTCAGATCCATAAAGTTCGTTCTACCG | |
| | CGGACCGTGTTCTGACCGGTTACCAGGTTGACAAGAACAAAGATG | |
| | ACGAGCTGACGGGTTTC | |
| FcRn-12 | ATGATCCCGCGTGGCCTGTCTGAAGCTAAACCAGCAACTCCGGAAA | 1008 |
| 1 | TTCAAGAGATCGTCGATAAGGTGAAACCGCAGCTGGAAGAGAAAA | |
| | CGAACGAAACCTACGGTAAGCTGGAAGCGGTCCAGTACAAAACCC | |
| | AAGTGCTAGCAAAATACTTTGCACCACATGCACCACATTCCACCAA | |
| | CTATTACATTAAGGTTCGTGCCGGTGACAATAAGTATATGCACCTG | |
| | AAAGTGTTCAACGGCCCGCATTACCATCATCGTCATCAGCATTCTG | |
| | CGGACCGTGTTCTGACCGGTTACCAGGTTGACAAGAACAAAGATG | |
| | ACGAGCTGACGGGTTTC | |
| FcRn-12 | ATGATCCCGCGTGGCCTGTCTGAAGCTAAACCAGCAACTCCGGAAA | 1009 |
| 2 | TTCAAGAGATCGTCGATAAGGTGAAACCGCAGCTGGAAGAGAAAA | |
| | CGAACGAAACCTACGGTAAGCTGGAAGCGGTCCAGTACAAAACCC | |
| | AAGTGCTAGCACTGCATCATCGTGCACATAAACATCTGTCCACCAA | |
| | CTATTACATTAAGGTTCGTGCCGGTGACAATAAGTATATGCACCTG | |
| | AAAGTGTTCAACGGCCCGTACTTTCATCGTGAACATGAACATCAGG | |
| | CGGACCGTGTTCTGACCGGTTACCAGGTTGACAAGAACAAAGATG | |
| | ACGAGCTGACGGGTTTC | |
| FcRn-12 | ATGATCCCGCGTGGCCTGTCTGAAGCTAAACCAGCAACTCCGGAAA | 1010 |
| 3 | TTCAAGAGATCGTCGATAAGGTGAAACCGCAGCTGGAAGAGAAAA | |
| | CGAACGAAACCTACGGTAAGCTGGAAGCGGTCCAGTACAAAACCC | |
| | AAGTGCTAGCAGCACATCATGGTCATTACGGTCGTGCATCCACCAA | |
| | CTATTACATTAAGGTTCGTGCCGGTGACAATAAGTATATGCACCTG | |
| | AAAGTGTTCAACGGCCCGTGGCATTACCATCATTCTCAGTGGCGTG | |
| | CGGACCGTGTTCTGACCGGTTACCAGGTTGACAAGAACAAAGATG | |
| | ACGAGCTGACGGGTTTC | |
| FcRn-12 | ATGATCCCGCGTGGCCTGTCTGAAGCTAAACCAGCAACTCCGGAAA | 1011 |
| 4 | TTCAAGAGATCGTCGATAAGGTGAAACCGCAGCTGGAAGAGAAAA | |
| | CGAACGAAACCTACGGTAAGCTGGAAGCGGTCCAGTACAAAACCC | |
| | AAGTGCTAGCACCAGAACATTACTCTCTGTTTAAACCATCCACCAA | |
| | CTATTACATTAAGGTTCGTGCCGGTGACAATAAGTATATGCACCTG | |
| | AAAGTGTTCAACGGCCCTAAACATCATCGTAAACATCGTCATTGGG | |
| | CGGACCGTGTTCTGACCGGTTACCAGGTTGACAAGAACAAAGATG | |
| | ACGAGCTGACGGGTTTC | |
| FcRn-12 | ATGATCCCGCGTGGCCTGTCTGAAGCTAAACCAGCAACTCCGGAAA | 1012 |
| 5 | TTCAAGAGATCGTCGATAAGGTGAAACCGCAGCTGGAAGAGAAAA | |
| | CGAACGAAACCTACGGTAAGCTGGAAGCGGTCCAGTACAAAACCC | |
| | AAGTGCTAGCAGATCATCGTCCACGTCATCCAAAACATTCCACCAA | |
| | CTATTACATTAAGGTTCGTGCCGGTGACAATAAGTATATGCACCTG | |
| | AAAGTGTTCAACGGCCCGGCACATAAACATCATCTGGGTTTTAAAG | |
| | CGGACCGTGTTCTGACCGGTTACCAGGTTGACAAGAACAAAGATG | |
| | ACGAGCTGACGGGTTTC | |
| FcRn-12 | ATGATCCCGCGTGGCCTGTCTGAAGCTAAACCAGCAACTCCGGAAA | 1013 |
| 6 | TTCAAGAGATCGTCGATAAGGTGAAACCGCAGCTGGAAGAGAAAA | |
| | CGAACGAAACCTACGGTAAGCTGGAAGCGGTCCAGTACAAAACCC | |
| | AAGTGCTAGCAAAACATGAAGTTCATCATCATGGTAACTCCACCAA | |
| | CTATTACATTAAGGTTCGTGCCGGTGACAATAAGTATATGCACCTG | |
| | AAAGTGTTCAACGGCCCGTGGCATCGTCATGGTTCTGGTTTTCGTG | |
| | CGGACCGTGTTCTGACCGGTTACCAGGTTGACAAGAACAAAGATG | |
| | ACGAGCTGACGGGTTTC | |
| FcRn-12 | ATGATCCCGCGTGGCCTGTCTGAAGCTAAACCAGCAACTCCGGAAA | 1014 |
| 7 | TTCAAGAGATCGTCGATAAGGTGAAACCGCAGCTGGAAGAGAAAA | |
| | CGAACGAAACCTACGGTAAGCTGGAAGCGGTCCAGTACAAAACCC | |
| | AAGTGCTAGCAAAATCTCACCATCATAAACATCGTGAATCCACCAA | |
| | CTATTACATTAAGGTTCGTGCCGGTGACAATAAGTATATGCACCTG | |
| | AAAGTGTTCAACGGCCCGGTTGATCGTTTTCTGCATGTTAAAAAAG | |
| | CGGACCGTGTTCTGACCGGTTACCAGGTTGACAAGAACAAAGATG | |
| | ACGAGCTGACGGGTTTC | |
| FcRn-12 | ATGATCCCGCGTGGCCTGTCTGAAGCTAAACCAGCAACTCCGGAAA | 1015 |
| 8 | TTCAAGAGATCGTCGATAAGGTGAAACCGCAGCTGGAAGAGAAAA | |
| | CGAACGAAACCTACGGTAAGCTGGAAGCGGTCCAGTACAAAACCC | |
| | AAGTGCTAGCACATCGTCATCATACCCATAAATGGACCTCCACCAA | |
| | CTATTACATTAAGGTTCGTGCCGGTGACAATAAGTATATGCACCTG | |
| | AAAGTGTTCAACGGCCCGTGGCCACATTCTATCGATTACCGTCAGG | |
| | CGGACCGTGTTCTGACCGGTTACCAGGTTGACAAGAACAAAGATG | |
| | ACGAGCTGACGGGTTTC | |
| FcRn-12 | ATGATCCCGCGTGGCCTGTCTGAAGCTAAACCAGCAACTCCGGAAA | 1016 |
| 9 | TTCAAGAGATCGTCGATAAGGTGAAACCGCAGCTGGAAGAGAAAA | |
| | CGAACGAAACCTACGGTAAGCTGGAAGCGGTCCAGTACAAAACCC | |
| | AAGTGCTAGCAGGTAAACATCCACATCATCATCAGAACTCCACCAA | |
| | CTATTACATTAAGGTTCGTGCCGGTGACAATAAGTATATGCACCTG | |
| | AAAGTGTTCAACGGCCCGAAAGGTCGTTACTCTCATCATCATGGTG | |
| | CGGACCGTGTTCTGACCGGTTACCAGGTTGACAAGAACAAAGATG | |
| | ACGAGCTGACGGGTTTC | |
| FcRn-13 | ATGATCCCGCGTGGCCTGTCTGAAGCTAAACCAGCAACTCCGGAAA | 1017 |
| 0 | TTCAAGAGATCGTCGATAAGGTGAAACCGCAGCTGGAAGAGAAAA | |
| | CGAACGAAACCTACGGTAAGCTGGAAGCGGTCCAGTACAAAACCC | |
| | AAGTGCTAGCATGGCATAAACATCATCTGCGTTACCGTTCCACCAA | |
| | CTATTACATTAAGGTTCGTGCCGGTGACAATAAGTATATGCACCTG | |
| | AAAGTGTTCAACGGCCCGTACCCACAGGATAAACATAAAGTTCTG | |
| | GCGGACCGTGTTCTGACCGGTTACCAGGTTGACAAGAACAAAGAT | |
| | GACGAGCTGACGGGTTTC | |
| FcRn-13 | ATGATCCCGCGTGGCCTGTCTGAAGCTAAACCAGCAACTCCGGAAA | 1018 |
| 1 | TTCAAGAGATCGTCGATAAGGTGAAACCGCAGCTGGAAGAGAAAA | |
| | CGAACGAAACCTACGGTAAGCTGGAAGCGGTCCAGTACAAAACCC | |
| | AAGTGCTAGCAAAAACCCATAAAGAATACCATCATTCTTCCACCAA | |
| | CTATTACATTAAGGTTCGTGCCGGTGACAATAAGTATATGCACCTG | |
| | AAAGTGTTCAACGGCCCGGGTTACCGTCGTCATCAGGGTCGTGGTG | |
| | CGGACCGTGTTCTGACCGGTTACCAGGTTGACAAGAACAAAGATG | |
| | ACGAGCTGACGGGTTTC | |
| FcRn-13 | ATGATCCCGCGTGGCCTGTCTGAAGCTAAACCAGCAACTCCGGAAA | 1019 |
| 2 | TTCAAGAGATCGTCGATAAGGTGAAACCGCAGCTGGAAGAGAAAA | |
| | CGAACGAAACCTACGGTAAGCTGGAAGCGGTCCAGTACAAAACCC | |
| | AAGTGCTAGCACGTCGTCATCATCATCAGCATTGGTCTTCCACCAA | |
| | CTATTACATTAAGGTTCGTGCCGGTGACAATAAGTATATGCACCTG | |
| | AAAGTGTTCAACGGCCCGGCACTGCATGATACCCTGCATCCATCTG | |
| | CGGACCGTGTTCTGACCGGTTACCAGGTTGACAAGAACAAAGATG | |
| | ACGAGCTGACGGGTTTC | |
| FcRn-13 | ATGATCCCGCGTGGCCTGTCTGAAGCTAAACCAGCAACTCCGGAAA | 1020 |
| 3 | TTCAAGAGATCGTCGATAAGGTGAAACCGCAGCTGGAAGAGAAAA | |
| | CGAACGAAACCTACGGTAAGCTGGAAGCGGTCCAGTACAAAACCC | |
| | AAGTGCTAGCAACCCATCGTTGGCATCAGGGTTCTCGTTCCACCAA | |
| | CTATTACATTAAGGTTCGTGCCGGTGACAATAAGTATATGCACCTG | |
| | AAAGTGTTCAACGGCCCGAAAAAACCACATAACCATCGTTACTAC | |
| | GCGGACCGTGTTCTGACCGGTTACCAGGTTGACAAGAACAAAGAT | |
| | GACGAGCTGACGGGTTTC | |
| FcRn-13 | ATGATCCCGCGTGGCCTGTCTGAAGCTAAACCAGCAACTCCGGAAA | 1021 |
| 4 | TTCAAGAGATCGTCGATAAGGTGAAACCGCAGCTGGAAGAGAAAA | |
| | CGAACGAAACCTACGGTAAGCTGGAAGCGGTCCAGTACAAAACCC | |
| | AAGTGCTAGCAAAACGTGGTCATCATCATCCAAACCATTCCACCAA | |
| | CTATTACATTAAGGTTCGTGCCGGTGACAATAAGTATATGCACCTG | |
| | AAAGTGTTCAACGGCCCGGCAAAACATCATTGGGATACCTGGTCTG | |
| | CGGACCGTGTTCTGACCGGTTACCAGGTTGACAAGAACAAAGATG | |
| | ACGAGCTGACGGGTTTC | |
| FcRn-13 | ATGATCCCGCGTGGCCTGTCTGAAGCTAAACCAGCAACTCCGGAAA | 1022 |
| 5 | TTCAAGAGATCGTCGATAAGGTGAAACCGCAGCTGGAAGAGAAAA | |
| | CGAACGAAACCTACGGTAAGCTGGAAGCGGTCCAGTACAAAACCC | |
| | AAGTGCTAGCACATACCGTTCCACTGCGTAAACATCAGTCCACCAA | |
| | CTATTACATTAAGGTTCGTGCCGGTGACAATAAGTATATGCACCTG | |
| | AAAGTGTTCAACGGCCCGGTTATCCATCATAAACATCGTCATCAGG | |
| | CGGACCGTGTTCTGACCGGTTACCAGGTTGACAAGAACAAAGATG | |
| | ACGAGCTGACGGGTTTC | |
| FcRn-13 | ATGATCCCGCGTGGCCTGTCTGAAGCTAAACCAGCAACTCCGGAAA | 1023 |
| 6 | TTCAAGAGATCGTCGATAAGGTGAAACCGCAGCTGGAAGAGAAAA | |
| | CGAACGAAACCTACGGTAAGCTGGAAGCGGTCCAGTACAAAACCC | |
| | AAGTGCTAGCAACCTACCGTTGGGGTCATCATTTTCATTCCACCAA | |
| | CTATTACATTAAGGTTCGTGCCGGTGACAATAAGTATATGCACCTG | |
| | AAAGTGTTCAACGGCCCGAAATACGAACAGATCGATCGTTGGCAT | |
| | GCGGACCGTGTTCTGACCGGTTACCAGGTTGACAAGAACAAAGAT | |
| | GACGAGCTGACGGGTTTC | |
| FcRn-13 | ATGATCCCGCGTGGCCTGTCTGAAGCTAAACCAGCAACTCCGGAAA | 1024 |
| 7 | TTCAAGAGATCGTCGATAAGGTGAAACCGCAGCTGGAAGAGAAAA | |
| | CGAACGAAACCTACGGTAAGCTGGAAGCGGTCCAGTACAAAACCC | |
| | AAGTGCTAGCATTTAAACATCATGATCGTGGTACCCATTCCACCAA | |
| | CTATTACATTAAGGTTCGTGCCGGTGACAATAAGTATATGCACCTG | |
| | AAAGTGTTCAACGGCCCGTACCGTAAACGTCATACCTGGTTTCAGG | |
| | CGGACCGTGTTCTGACCGGTTACCAGGTTGACAAGAACAAAGATG | |
| | ACGAGCTGACGGGTTTC | |
| FcRn-13 | ATGATCCCGCGTGGCCTGTCTGAAGCTAAACCAGCAACTCCGGAAA | 1025 |
| 8 | TTCAAGAGATCGTCGATAAGGTGAAACCGCAGCTGGAAGAGAAAA | |
| | CGAACGAAACCTACGGTAAGCTGGAAGCGGTCCAGTACAAAACCC | |
| | AAGTGCTAGCAACCGCAAAAAAACATCCAAAATCTCATTCCACCA | |
| | ACTATTACATTAAGGTTCGTGCCGGTGACAATAAGTATATGCACCT | |
| | GAAAGTGTTCAACGGCCCGAAAGTTAACTGGCATCACTACCGTCAT | |
| | GCGGACCGTGTTCTGACCGGTTACCAGGTTGACAAGAACAAAGAT | |
| | GACGAGCTGACGGGTTTC | |
| FcRn-13 | ATGATCCCGCGTGGCCTGTCTGAAGCTAAACCAGCAACTCCGGAAA | 1026 |
| 9 | TTCAAGAGATCGTCGATAAGGTGAAACCGCAGCTGGAAGAGAAAA | |
| | CGAACGAAACCTACGGTAAGCTGGAAGCGGTCCAGTACAAAACCC | |
| | AAGTGCTAGCACATTACCATTTTTCTAAACATCATAACTCCACCAA | |
| | CTATTACATTAAGGTTCGTGCCGGTGACAATAAGTATATGCACCTG | |
| | AAAGTGTTCAACGGCCCGTCTTACCATCATAAACATTTTGTTAAAG | |
| | CGGACCGTGTTCTGACCGGTTACCAGGTTGACAAGAACAAAGATG | |
| | ACGAGCTGACGGGTTTC | |
| FcRn-14 | ATGATCCCGCGTGGCCTGTCTGAAGCTAAACCAGCAACTCCGGAAA | 1027 |
| 0 | TTCAAGAGATCGTCGATAAGGTGAAACCGCAGCTGGAAGAGAAAA | |
| | CGAACGAAACCTACGGTAAGCTGGAAGCGGTCCAGTACAAAACCC | |
| | AAGTGCTAGCATACAAACATAAACATGGTAAATGGCGTTCCACCA | |
| | ACTATTACATTAAGGTTCGTGCCGGTGACAATAAGTATATGCACCT | |
| | GAAAGTGTTCAACGGCCCGTGGCATGGTCATTTTTCTAAAGGTGGT | |
| | GTTGCATACGCGGACCGTGTTCTGACCGGTTACCAGGTTGACAAGA | |
| | ACAAAGATGACGAGCTGACGGGTTTC | |
| FcRn-14 | ATGATCCCGCGTGGCCTGTCTGAAGCTAAACCAGCAACTCCGGAAA | 1028 |
| 1 | TTCAAGAGATCGTCGATAAGGTGAAACCGCAGCTGGAAGAGAAAA | |
| | CGAACGAAACCTACGGTAAGCTGGAAGCGGTCCAGTACAAAACCC | |
| | AAGTGCTAGCAGTTCATCATAAACCACATAAAACCGAATCCACCA | |
| | ACTATTACATTAAGGTTCGTGCCGGTGACAATAAGTATATGCACCT | |
| | GAAAGTGTTCAACGGCCCGGCAACCCATCTGAAACATCATAACCAT | |
| | GCGGACCGTGTTCTGACCGGTTACCAGGTTGACAAGAACAAAGAT | |
| | GACGAGCTGACGGGTTTC | |
| FcRn-14 | ATGATCCCGCGTGGCCTGTCTGAAGCTAAACCAGCAACTCCGGAAA | 1029 |
| 2 | TTCAAGAGATCGTCGATAAGGTGAAACCGCAGCTGGAAGAGAAAA | |
| | CGAACGAAACCTACGGTAAGCTGGAAGCGGTCCAGTACAAAACCC | |
| | AAGTGCTAGCACATGGTCAGCGTTACCATAACAAATCTTCCACCAA | |
| | CTATTACATTAAGGTTCGTGCCGGTGACAATAAGTATATGCACCTG | |
| | AAAGTGTTCAACGGCCCGAAACGTAAATGGGAACATTCTCATAAA | |
| | GCGGACCGTGTTCTGACCGGTTACCAGGTTGACAAGAACAAAGAT | |
| | GACGAGCTGACGGGTTTC | |
| FcRn-14 | ATGATCCCGCGTGGCCTGTCTGAAGCTAAACCAGCAACTCCGGAAA | 1030 |
| 3 | TTCAAGAGATCGTCGATAAGGTGAAACCGCAGCTGGAAGAGAAAA | |
| | CGAACGAAACCTACGGTAAGCTGGAAGCGGTCCAGTACAAAACCC | |
| | AAGTGCTAGCACATAAACATCATCGTCATGTTCCATCTTCCACCAA | |
| | CTATTACATTAAGGTTCGTGCCGGTGACAATAAGTATATGCACCTG | |
| | AAAGTGTTCAACGGCCCGGATCATCGTCATCGTCATTGGTACCTGG | |
| | CGGACCGTGTTCTGACCGGTTACCAGGTTGACAAGAACAAAGATG | |
| | ACGAGCTGACGGGTTTC | |
| FcRn-14 | ATGATCCCGCGTGGCCTGTCTGAAGCTAAACCAGCAACTCCGGAAA | 1031 |
| 4 | TTCAAGAGATCGTCGATAAGGTGAAACCGCAGCTGGAAGAGAAAA | |
| | CGAACGAAACCTACGGTAAGCTGGAAGCGGTCCAGTACAAAACCC | |
| | AAGTGCTAGCACATCGTAAACATTCTTGGTCTCGTCATTCCACCAA | |
| | CTATTACATTAAGGTTCGTGCCGGTGACAATAAGTATATGCACCTG | |
| | AAAGTGTTCAACGGCCCGACCAAACATTCTCATTCTCAGCTGTTTG | |
| | CGGACCGTGTTCTGACCGGTTACCAGGTTGACAAGAACAAAGATG | |
| | ACGAGCTGACGGGTTTC | |
| FcRn-14 | ATGATCCCGCGTGGCCTGTCTGAAGCTAAACCAGCAACTCCGGAAA | 1032 |
| 5 | TTCAAGAGATCGTCGATAAGGTGAAACCGCAGCTGGAAGAGAAAA | |
| | CGAACGAAACCTACGGTAAGCTGGAAGCGGTCCAGTACAAAACCC | |
| | AAGTGCTAGCAAACCGTCATTACCATCAGGAATACAAATCCACCA | |
| | ACTATTACATTAAGGTTCGTGCCGGTGACAATAAGTATATGCACCT | |
| | GAAAGTGTTCAACGGCCCGGTTCATAAATCTAAACACTGGTTTTAC | |
| | GCGGACCGTGTTCTGACCGGTTACCAGGTTGACAAGAACAAAGAT | |
| | GACGAGCTGACGGGTTTC | |
| FcRn-14 | ATGATCCCGCGTGGCCTGTCTGAAGCTAAACCAGCAACTCCGGAAA | 1033 |
| 6 | TTCAAGAGATCGTCGATAAGGTGAAACCGCAGCTGGAAGAGAAAA | |
| | CGAACGAAACCTACGGTAAGCTGGAAGCGGTCCAGTACAAAACCC | |
| | AAGTGCTAGCAAAAATCAAACATCATCATTCTTTTAAATCCACCAA | |
| | CTATTACATTAAGGTTCGTGCCGGTGACAATAAGTATATGCACCTG | |
| | AAAGTGTTCAACGGCCCGTCTCAGGATCATCATTTTCATCGTCATG | |
| | CGGACCGTGTTCTGACCGGTTACCAGGTTGACAAGAACAAAGATG | |
| | ACGAGCTGACGGGTTTC | |
| FcRn-14 | ATGATCCCGCGTGGCCTGTCTGAAGCTAAACCAGCAACTCCGGAAA | 1034 |
| 7 | TTCAAGAGATCGTCGATAAGGTGAAACCGCAGCTGGAAGAGAAAA | |
| | CGAACGAAACCTACGGTAAGCTGGAAGCGGTCCAGTACAAAACCC | |
| | AAGTGCTAGCACAGCATAAACGTTCTCATCGTCAGTCTTCCACCAA | |
| | CTATTACATTAAGGTTCGTGCCGGTGACAATAAGTATATGCACCTG | |
| | AAAGTGTTCAACGGCCCGGGTCATAAATATTCTCATTGGTCTAAAG | |
| | CGGACCGTGTTCTGACCGGTTACCAGGTTGACAAGAACAAAGATG | |
| | ACGAGCTGACGGGTTTC | |
| FcRn-14 | ATGATCCCGCGTGGCCTGTCTGAAGCTAAACCAGCAACTCCGGAAA | 1035 |
| 8 | TTCAAGAGATCGTCGATAAGGTGAAACCGCAGCTGGAAGAGAAAA | |
| | CGAACGAAACCTACGGTAAGCTGGAAGCGGTCCAGTACAAAACCC | |
| | AAGTGCTAGCATCTGTTTACAAATGGAAAGCATCCACCAACTATTA | |
| | CATTAAGGTTCGTGCCGGTGACAATAAGTATATGCACCTGAAAGTG | |
| | TTCAACGGCCCGAACAAACATCATCATCATGCACATCATGCGGACC | |
| | GTGTTCTGACCGGTTACCAGGTTGACAAGAACAAAGATGACGAGC | |
| | TGACGGGTTTC | |
| FcRn-14 | ATGATCCCGCGTGGCCTGTCTGAAGCTAAACCAGCAACTCCGGAAA | 1036 |
| 9 | TTCAAGAGATCGTCGATAAGGTGAAACCGCAGCTGGAAGAGAAAA | |
| | CGAACGAAACCTACGGTAAGCTGGAAGCGGTCCAGTACAAAACCC | |
| | AAGTGCTAGCACGTAAACTGGAACGTACCAAATACCATTCCACCA | |
| | ACTATTACATTAAGGTTCGTGCCGGTGACAATAAGTATATGCACCT | |
| | GAAAGTGTTCAACGGCCCGCATAACAAATACCATCCACATAACAA | |
| | AGCGGACCGTGTTCTGACCGGTTACCAGGTTGACAAGAACAAAGA | |
| | TGACGAGCTGACGGGTTTC | |
| FcRn-15 | ATGATCCCGCGTGGCCTGTCTGAAGCTAAACCAGCAACTCCGGAAA | 1037 |
| 0 | TTCAAGAGATCGTCGATAAGGTGAAACCGCAGCTGGAAGAGAAAA | |
| | CGAACGAAACCTACGGTAAGCTGGAAGCGGTCCAGTACAAAACCC | |
| | AAGTGCTAGCAACCGGTCATAAACATCAGTTTCATCAGTCCACCAA | |
| | CTATTACATTAAGGTTCGTGCCGGTGACAATAAGTATATGCACCTG | |
| | AAAGTGTTCAACGGCCCGAAACATAAACATGGTTGGTTTCATTCTG | |
| | CGGACCGTGTTCTGACCGGTTACCAGGTTGACAAGAACAAAGATG | |
| | ACGAGCTGACGGGTTTC | |
| FcRn-15 | ATGATCCCGCGTGGCCTGTCTGAAGCTAAACCAGCAACTCCGGAAA | 1038 |
| 1 | TTCAAGAGATCGTCGATAAGGTGAAACCGCAGCTGGAAGAGAAAA | |
| | CGAACGAAACCTACGGTAAGCTGGAAGCGGTCCAGTACAAAACCC | |
| | AAGTGCTAGCATGGCAGGAACTGGGTCATCGTGTTTACTCCACCAA | |
| | CTATTACATTAAGGTTCGTGCCGGTGACAATAAGTATATGCACCTG | |
| | AAAGTGTTCAACGGCCCGTACCGTCGTCATCATGATAAAAAACATG | |
| | CGGACCGTGTTCTGACCGGTTACCAGGTTGACAAGAACAAAGATG | |
| | ACGAGCTGACGGGTTTC | |
| FcRn-15 | ATGATCCCGCGTGGCCTGTCTGAAGCTAAACCAGCAACTCCGGAAA | 1039 |
| 2 | TTCAAGAGATCGTCGATAAGGTGAAACCGCAGCTGGAAGAGAAAA | |
| | CGAACGAAACCTACGGTAAGCTGGAAGCGGTCCAGTACAAAACCC | |
| | AAGTGCTAGCACATCCACATCATACCGATCAGCGTCATTCCACCAA | |
| | CTATTACATTAAGGTTCGTGCCGGTGACAATAAGTATATGCACCTG | |
| | AAAGTGTTCAACGGCCCGGAAGGTCATCGTCAGCATGCAAAATTTG | |
| | CGGACCGTGTTCTGACCGGTTACCAGGTTGACAAGAACAAAGATG | |
| | ACGAGCTGACGGGTTTC | |
| FcRn-15 | ATGATCCCGCGTGGCCTGTCTGAAGCTAAACCAGCAACTCCGGAAA | 1040 |
| 3 | TTCAAGAGATCGTCGATAAGGTGAAACCGCAGCTGGAAGAGAAAA | |
| | CGAACGAAACCTACGGTAAGCTGGAAGCGGTCCAGTACAAAACCC | |
| | AAGTGCTAGCATTTCATAACCATGGTCATCCACATCTGTCCACCAA | |
| | CTATTACATTAAGGTTCGTGCCGGTGACAATAAGTATATGCACCTG | |
| | AAAGTGTTCAACGGCCCGAACTCTCGTGGTCATCATCATCATAAAG | |
| | CGGACCGTGTTCTGACCGGTTACCAGGTTGACAAGAACAAAGATG | |
| | ACGAGCTGACGGGTTTC | |
| FcRn-15 | ATGATCCCGCGTGGCCTGTCTGAAGCTAAACCAGCAACTCCGGAAA | 1041 |
| 4 | TTCAAGAGATCGTCGATAAGGTGAAACCGCAGCTGGAAGAGAAAA | |
| | CGAACGAAACCTACGGTAAGCTGGAAGCGGTCCAGTACAAAACCC | |
| | AAGTGCTAGCATGGAACCATCATCATCGTAACAAACAGTCCACCA | |
| | ACTATTACATTAAGGTTCGTGCCGGTGACAATAAGTATATGCACCT | |
| | GAAAGTGTTCAACGGCCCGCCACATAAACGTCCACATCTGTACCAT | |
| | GCGGACCGTGTTCTGACCGGTTACCAGGTTGACAAGAACAAAGAT | |
| | GACGAGCTGACGGGTTTC | |
| FcRn-15 | ATGATCCCGCGTGGCCTGTCTGAAGCTAAACCAGCAACTCCGGAAA | 1042 |
| 5 | TTCAAGAGATCGTCGATAAGGTGAAACCGCAGCTGGAAGAGAAAA | |
| | CGAACGAAACCTACGGTAAGCTGGAAGCGGTCCAGTACAAAACCC | |
| | AAGTGCTAGCAACCCGTCATGGTCATCGTCATTACCGTTCCACCAA | |
| | CTATTACATTAAGGTTCGTGCCGGTGACAATAAGTATATGCACCTG | |
| | AAAGTGTTCAACGGCCCGTTTTACGATCTGCATCCAAAACTGTCTG | |
| | CGGACCGTGTTCTGACCGGTTACCAGGTTGACAAGAACAAAGATG | |
| | ACGAGCTGACGGGTTTC | |
| FcRn-15 | ATGATCCCGCGTGGCCTGTCTGAAGCTAAACCAGCAACTCCGGAAA | 1043 |
| 6 | TTCAAGAGATCGTCGATAAGGTGAAACCGCAGCTGGAAGAGAAAA | |
| | CGAACGAAACCTACGGTAAGCTGGAAGCGGTCCAGTACAAAACCC | |
| | AAGTGCTAGCACCACATCATCGTTGGCATCGTCAGCATTCCACCAA | |
| | CTATTACATTAAGGTTCGTGCCGGTGACAATAAGTATATGCACCTG | |
| | AAAGTGTTCAACGGCCCGATCCATCAGCATTCTCAGAAAAAATCTG | |
| | CGGACCGTGTTCTGACCGGTTACCAGGTTGACAAGAACAAAGATG | |
| | ACGAGCTGACGGGTTTC | |
| FcRn-15 | ATGATCCCGCGTGGCCTGTCTGAAGCTAAACCAGCAACTCCGGAAA | 1044 |
| 7 | TTCAAGAGATCGTCGATAAGGTGAAACCGCAGCTGGAAGAGAAAA | |
| | CGAACGAAACCTACGGTAAGCTGGAAGCGGTCCAGTACAAAACCC | |
| | AAGTGCTAGCAAACCTGCGTCATCAGACCGAACATCGTTCCACCAA | |
| | CTATTACATTAAGGTTCGTGCCGGTGACAATAAGTATATGCACCTG | |
| | AAAGTGTTCAACGGCCCGAAACGTCATCATCGTCATTCTCATGTTG | |
| | CGGACCGTGTTCTGACCGGTTACCAGGTTGACAAGAACAAAGATG | |
| | ACGAGCTGACGGGTTTC | |
| FcRn-15 | ATGATCCCGCGTGGCCTGTCTGAAGCTAAACCAGCAACTCCGGAAA | 1045 |
| 8 | TTCAAGAGATCGTCGATAAGGTGAAACCGCAGCTGGAAGAGAAAA | |
| | CGAACGAAACCTACGGTAAGCTGGAAGCGGTCCAGTACAAAACCC | |
| | AAGTGCTAGCAGGTCATCGTAAACATACCCATCTGCTGTCCACCAA | |
| | CTATTACATTAAGGTTCGTGCCGGTGACAATAAGTATATGCACCTG | |
| | AAAGTGTTCAACGGCCCGAAAAAATCTCATAAAGCATGGGCATGG | |
| | GCGGACCGTGTTCTGACCGGTTACCAGGTTGACAAGAACAAAGAT | |
| | GACGAGCTGACGGGTTTC | |
| FcRn-15 | ATGATCCCGCGTGGCCTGTCTGAAGCTAAACCAGCAACTCCGGAAA | 1046 |
| 9 | TTCAAGAGATCGTCGATAAGGTGAAACCGCAGCTGGAAGAGAAAA | |
| | CGAACGAAACCTACGGTAAGCTGGAAGCGGTCCAGTACAAAACCC | |
| | AAGTGCTAGCACGTCATTCTAAACCACAGCATTGGCCATCCACCAA | |
| | CTATTACATTAAGGTTCGTGCCGGTGACAATAAGTATATGCACCTG | |
| | AAAGTGTTCAACGGCCCGAAAGGTCATAAACAGCATCATCATTAC | |
| | GCGGACCGTGTTCTGACCGGTTACCAGGTTGACAAGAACAAAGAT | |
| | GACGAGCTGACGGGTTTC | |
| FcRn-16 | ATGATCCCGCGTGGCCTGTCTGAAGCTAAACCAGCAACTCCGGAAA | 1047 |
| 0 | TTCAAGAGATCGTCGATAAGGTGAAACCGCAGCTGGAAGAGAAAA | |
| | CGAACGAAACCTACGGTAAGCTGGAAGCGGTCCAGTACAAAACCC | |
| | AAGTGCTAGCACCACATCGTTCTCGTTTTCATAAACAGTCCACCAA | |
| | CTATTACATTAAGGTTCGTGCCGGTGACAATAAGTATATGCACCTG | |
| | AAAGTGTTCAACGGCCCGTGGAAAGCAGAACGTCATAAACATTAC | |
| | GCGGACCGTGTTCTGACCGGTTACCAGGTTGACAAGAACAAAGAT | |
| | GACGAGCTGACGGGTTTC | |
| FcRn-16 | ATGATCCCGCGTGGCCTGTCTGAAGCTAAACCAGCAACTCCGGAAA | 1048 |
| 1 | TTCAAGAGATCGTCGATAAGGTGAAACCGCAGCTGGAAGAGAAAA | |
| | CGAACGAAACCTACGGTAAGCTGGAAGCGGTCCAGTACAAAACCC | |
| | AAGTGCTAGCACAGCGTAAACATTTTCATTGGGATCATTCCACCAA | |
| | CTATTACATTAAGGTTCGTGCCGGTGACAATAAGTATATGCACCTG | |
| | AAAGTGTTCAACGGCCCGCAGCATCGTTACACCCATCATCATACCG | |
| | CGGACCGTGTTCTGACCGGTTACCAGGTTGACAAGAACAAAGATG | |
| | ACGAGCTGACGGGTTTC | |
| FcRn-16 | ATGATCCCGCGTGGCCTGTCTGAAGCTAAACCAGCAACTCCGGAAA | 1049 |
| 2 | TTCAAGAGATCGTCGATAAGGTGAAACCGCAGCTGGAAGAGAAAA | |
| | CGAACGAAACCTACGGTAAGCTGGAAGCGGTCCAGTACAAAACCC | |
| | AAGTGCTAGCAAACAAACATCATGGTCAGCAGCATAACTCCACCA | |
| | ACTATTACATTAAGGTTCGTGCCGGTGACAATAAGTATATGCACCT | |
| | GAAAGTGTTCAACGGCCCGTCTCATAAAGTTCATACCCATTCTAAA | |
| | GCGGACCGTGTTCTGACCGGTTACCAGGTTGACAAGAACAAAGAT | |
| | GACGAGCTGACGGGTTTC | |
| FcRn-16 | ATGATCCCGCGTGGCCTGTCTGAAGCTAAACCAGCAACTCCGGAAA | 1050 |
| 3 | TTCAAGAGATCGTCGATAAGGTGAAACCGCAGCTGGAAGAGAAAA | |
| | CGAACGAAACCTACGGTAAGCTGGAAGCGGTCCAGTACAAAACCC | |
| | AAGTGCTAGCAAAATACCATCATAAATACAAATCTTACTCCACCAA | |
| | CTATTACATTAAGGTTCGTGCCGGTGACAATAAGTATATGCACCTG | |
| | AAAGTGTTCAACGGCCCGAAACATCTGGATCAGTACCATCCATCTG | |
| | CGGACCGTGTTCTGACCGGTTACCAGGTTGACAAGAACAAAGATG | |
| | ACGAGCTGACGGGTTTC | |
| FcRn-16 | ATGATCCCGCGTGGCCTGTCTGAAGCTAAACCAGCAACTCCGGAAA | 1051 |
| 4 | TTCAAGAGATCGTCGATAAGGTGAAACCGCAGCTGGAAGAGAAAA | |
| | CGAACGAAACCTACGGTAAGCTGGAAGCGGTCCAGTACAAAACCC | |
| | AAGTGCTAGCACGTGAATGGCATCATCAGACCTACTACTCCACCAA | |
| | CTATTACATTAAGGTTCGTGCCGGTGACAATAAGTATATGCACCTG | |
| | AAAGTGTTCAACGGCCCGTCTGCACATAAACATCATCATAACCATG | |
| | CGGACCGTGTTCTGACCGGTTACCAGGTTGACAAGAACAAAGATG | |
| | ACGAGCTGACGGGTTTC | |
| FcRn-16 | ATGATCCCGCGTGGCCTGTCTGAAGCTAAACCAGCAACTCCGGAAA | 1052 |
| 5 | TTCAAGAGATCGTCGATAAGGTGAAACCGCAGCTGGAAGAGAAAA | |
| | CGAACGAAACCTACGGTAAGCTGGAAGCGGTCCAGTACAAAACCC | |
| | AAGTGCTAGCACGTCATTACCATGATCATCATTACCGTTCCACCAA | |
| | CTATTACATTAAGGTTCGTGCCGGTGACAATAAGTATATGCACCTG | |
| | AAAGTGTTCAACGGCCCGAAATACAAACATCAGGTTAAACAGCAT | |
| | GCGGACCGTGTTCTGACCGGTTACCAGGTTGACAAGAACAAAGAT | |
| | GACGAGCTGACGGGTTTC | |
| FcRn-16 | ATGATCCCGCGTGGCCTGTCTGAAGCTAAACCAGCAACTCCGGAAA | 1053 |
| 6 | TTCAAGAGATCGTCGATAAGGTGAAACCGCAGCTGGAAGAGAAAA | |
| | CGAACGAAACCTACGGTAAGCTGGAAGCGGTCCAGTACAAAACCC | |
| | AAGTGCTAGCATCTCATACCTACCGTCATTCTACCGGTTCCACCAA | |
| | CTATTACATTAAGGTTCGTGCCGGTGACAATAAGTATATGCACCTG | |
| | AAAGTGTTCAACGGCCCGATCTCTCATCGTCATCGTCATGATATCG | |
| | CGGACCGTGTTCTGACCGGTTACCAGGTTGACAAGAACAAAGATG | |
| | ACGAGCTGACGGGTTTC | |
| FcRn-16 | ATGATCCCGCGTGGCCTGTCTGAAGCTAAACCAGCAACTCCGGAAA | 1054 |
| 7 | TTCAAGAGATCGTCGATAAGGTGAAACCGCAGCTGGAAGAGAAAA | |
| | CGAACGAAACCTACGGTAAGCTGGAAGCGGTCCAGTACAAAACCC | |
| | AAGTGCTAGCAAACCATCGTCATCATCATCCACATTTTTCCACCAA | |
| | CTATTACATTAAGGTTCGTGCCGGTGACAATAAGTATATGCACCTG | |
| | AAAGTGTTCAACGGCCCGAACTACCATGCACATCGTTCTTTTTACG | |
| | CGGACCGTGTTCTGACCGGTTACCAGGTTGACAAGAACAAAGATG | |
| | ACGAGCTGACGGGTTTC | |
| FcRn-16 | ATGATCCCGCGTGGCCTGTCTGAAGCTAAACCAGCAACTCCGGAAA | 1055 |
| 8 | TTCAAGAGATCGTCGATAAGGTGAAACCGCAGCTGGAAGAGAAAA | |
| | CGAACGAAACCTACGGTAAGCTGGAAGCGGTCCAGTACAAAACCC | |
| | AAGTGCTAGCACATGCAAAAACCCGTCATCATGAACATTCCACCAA | |
| | CTATTACATTAAGGTTCGTGCCGGTGACAATAAGTATATGCACCTG | |
| | AAAGTGTTCAACGGCCCGTGGTTTAAACATCATTTTTGGCATCGTG | |
| | CGGACCGTGTTCTGACCGGTTACCAGGTTGACAAGAACAAAGATG | |
| | ACGAGCTGACGGGTTTC | |
| FcRn-16 | ATGATCCCGCGTGGCCTGTCTGAAGCTAAACCAGCAACTCCGGAAA | 1056 |
| 9 | TTCAAGAGATCGTCGATAAGGTGAAACCGCAGCTGGAAGAGAAAA | |
| | CGAACGAAACCTACGGTAAGCTGGAAGCGGTCCAGTACAAAACCC | |
| | AAGTGCTAGCAGAACCACATCAGAAACATAAACGTCATTCCACCA | |
| | ACTATTACATTAAGGTTCGTGCCGGTGACAATAAGTATATGCACCT | |
| | GAAAGTGTTCAACGGCCCGAAACGTAAAGGTGATTTTCTGAACTAC | |
| | GCGGACCGTGTTCTGACCGGTTACCAGGTTGACAAGAACAAAGAT | |
| | GACGAGCTGACGGGTTTC | |
| FcRn-17 | ATGATCCCGCGTGGCCTGTCTGAAGCTAAACCAGCAACTCCGGAAA | 1057 |
| 0 | TTCAAGAGATCGTCGATAAGGTGAAACCGCAGCTGGAAGAGAAAA | |
| | CGAACGAAACCTACGGTAAGCTGGAAGCGGTCCAGTACAAAACCC | |
| | AAGTGCTAGCAGATCGTCGTCATCAGCATGGTCGTCATTCCACCAA | |
| | CTATTACATTAAGGTTCGTGCCGGTGACAATAAGTATATGCACCTG | |
| | AAAGTGTTCAACGGCCCGCATAAACCATGGGGTCATCATAAACTG | |
| | GCGGACCGTGTTCTGACCGGTTACCAGGTTGACAAGAACAAAGAT | |
| | GACGAGCTGACGGGTTTC | |
| FcRn-17 | ATGATCCCGCGTGGCCTGTCTGAAGCTAAACCAGCAACTCCGGAAA | 1058 |
| 1 | TTCAAGAGATCGTCGATAAGGTGAAACCGCAGCTGGAAGAGAAAA | |
| | CGAACGAAACCTACGGTAAGCTGGAAGCGGTCCAGTACAAAACCC | |
| | AAGTGCTAGCACATCAGCATCGTCATAACCTGCAGCAGTCCACCAA | |
| | CTATTACATTAAGGTTCGTGCCGGTGACAATAAGTATATGCACCTG | |
| | AAAGTGTTCAACGGCCCGCAGTACAAACATAAACATTGGCTGTGG | |
| | GCGGACCGTGTTCTGACCGGTTACCAGGTTGACAAGAACAAAGAT | |
| | GACGAGCTGACGGGTTTC | |
| FcRn-17 | ATGATCCCGCGTGGCCTGTCTGAAGCTAAACCAGCAACTCCGGAAA | 1059 |
| 2 | TTCAAGAGATCGTCGATAAGGTGAAACCGCAGCTGGAAGAGAAAA | |
| | CGAACGAAACCTACGGTAAGCTGGAAGCGGTCCAGTACAAAACCC | |
| | AAGTGCTAGCAAAACGTATCCATACCTGGCATACCGATTCCACCAA | |
| | CTATTACATTAAGGTTCGTGCCGGTGACAATAAGTATATGCACCTG | |
| | AAAGTGTTCAACGGCCCGTTTAAACGTCATCATTCTTGGCATCATG | |
| | CGGACCGTGTTCTGACCGGTTACCAGGTTGACAAGAACAAAGATG | |
| | ACGAGCTGACGGGTTTC | |
| FcRn-17 | ATGATCCCGCGTGGCCTGTCTGAAGCTAAACCAGCAACTCCGGAAA | 1060 |
| 3 | TTCAAGAGATCGTCGATAAGGTGAAACCGCAGCTGGAAGAGAAAA | |
| | CGAACGAAACCTACGGTAAGCTGGAAGCGGTCCAGTACAAAACCC | |
| | AAGTGCTAGCATACCATCATCAGCCACGTTACCAGCAGTCCACCAA | |
| | CTATTACATTAAGGTTCGTGCCGGTGACAATAAGTATATGCACCTG | |
| | AAAGTGTTCAACGGCCCGAAAGATCGTCATCATGAATTTCGTCATG | |
| | CGGACCGTGTTCTGACCGGTTACCAGGTTGACAAGAACAAAGATG | |
| | ACGAGCTGACGGGTTTC | |
| FcRn-17 | ATGATCCCGCGTGGCCTGTCTGAAGCTAAACCAGCAACTCCGGAAA | 1061 |
| 4 | TTCAAGAGATCGTCGATAAGGTGAAACCGCAGCTGGAAGAGAAAA | |
| | CGAACGAAACCTACGGTAAGCTGGAAGCGGTCCAGTACAAAACCC | |
| | AAGTGCTAGCAGGTATCGGTCGTCATCGTCGTCGTCGTTCCACCAA | |
| | CTATTACATTAAGGTTCGTGCCGGTGACAATAAGTATATGCACCTG | |
| | AAAGTGTTCAACGGCCCGCATCATCATCATTTTCATAACCATCGTG | |
| | CGGACCGTGTTCTGACCGGTTACCAGGTTGACAAGAACAAAGATG | |
| | ACGAGCTGACGGGTTTC | |
| FcRn-17 | ATGATCCCGCGTGGCCTGTCTGAAGCTAAACCAGCAACTCCGGAAA | 1062 |
| 5 | TTCAAGAGATCGTCGATAAGGTGAAACCGCAGCTGGAAGAGAAAA | |
| | CGAACGAAACCTACGGTAAGCTGGAAGCGGTCCAGTACAAAACCC | |
| | AAGTGCTAGCAGATCAGCATAAACAGCATTACCATTTTTCCACCAA | |
| | CTATTACATTAAGGTTCGTGCCGGTGACAATAAGTATATGCACCTG | |
| | AAAGTGTTCAACGGCCCGTCTGTTAACCAGCATTTTAAACATAAAG | |
| | CGGACCGTGTTCTGACCGGTTACCAGGTTGACAAGAACAAAGATG | |
| | ACGAGCTGACGGGTTTC | |
| FcRn-17 | ATGATCCCGCGTGGCCTGTCTGAAGCTAAACCAGCAACTCCGGAAA | 1063 |
| 6 | TTCAAGAGATCGTCGATAAGGTGAAACCGCAGCTGGAAGAGAAAA | |
| | CGAACGAAACCTACGGTAAGCTGGAAGCGGTCCAGTACAAAACCC | |
| | AAGTGCTAGCAGGTCGTCATCATGAATCTCATAAATCTTCCACCAA | |
| | CTATTACATTAAGGTTCGTGCCGGTGACAATAAGTATATGCACCTG | |
| | AAAGTGTTCAACGGCCCGTTTCAGCATAAACTGCATAAACATCATG | |
| | CGGACCGTGTTCTGACCGGTTACCAGGTTGACAAGAACAAAGATG | |
| | ACGAGCTGACGGGTTTC | |
| FcRn-17 | ATGATCCCGCGTGGCCTGTCTGAAGCTAAACCAGCAACTCCGGAAA | 1064 |
| 7 | TTCAAGAGATCGTCGATAAGGTGAAACCGCAGCTGGAAGAGAAAA | |
| | CGAACGAAACCTACGGTAAGCTGGAAGCGGTCCAGTACAAAACCC | |
| | AAGTGCTAGCAAAACGTCATCATCATTGGCATTACTCTTCCACCAA | |
| | CTATTACATTAAGGTTCGTGCCGGTGACAATAAGTATATGCACCTG | |
| | AAAGTGTTCAACGGCCCGGATACCCGTTACGATAAATGGCATGGTG | |
| | CGGACCGTGTTCTGACCGGTTACCAGGTTGACAAGAACAAAGATG | |
| | ACGAGCTGACGGGTTTC | |
| FcRn-17 | ATGATCCCGCGTGGCCTGTCTGAAGCTAAACCAGCAACTCCGGAAA | 1065 |
| 8 | TTCAAGAGATCGTCGATAAGGTGAAACCGCAGCTGGAAGAGAAAA | |
| | CGAACGAAACCTACGGTAAGCTGGAAGCGGTCCAGTACAAAACCC | |
| | AAGTGCTAGCAAACCGTAAAGGTGGTCATCGTTACCATTCCACCAA | |
| | CTATTACATTAAGGTTCGTGCCGGTGACAATAAGTATATGCACCTG | |
| | AAAGTGTTCAACGGCCCGCATGTTCATCGTGTTCAGCATTCTAAAG | |
| | CGGACCGTGTTCTGACCGGTTACCAGGTTGACAAGAACAAAGATG | |
| | ACGAGCTGACGGGTTTC | |
| FcRn-17 | ATGATCCCGCGTGGCCTGTCTGAAGCTAAACCAGCAACTCCGGAAA | 1066 |
| 9 | TTCAAGAGATCGTCGATAAGGTGAAACCGCAGCTGGAAGAGAAAA | |
| | CGAACGAAACCTACGGTAAGCTGGAAGCGGTCCAGTACAAAACCC | |
| | AAGTGCTAGCACGTAAATGGCATGGTCATTGGCATCGTTCCACCAA | |
| | CTATTACATTAAGGTTCGTGCCGGTGACAATAAGTATATGCACCTG | |
| | AAAGTGTTCAACGGCCCGTGGAACTACCAGTTTAAATCTGCATCTG | |
| | CGGACCGTGTTCTGACCGGTTACCAGGTTGACAAGAACAAAGATG | |
| | ACGAGCTGACGGGTTTC | |
| FcRn-18 | ATGATCCCGCGTGGCCTGTCTGAAGCTAAACCAGCAACTCCGGAAA | 1067 |
| 0 | TTCAAGAGATCGTCGATAAGGTGAAACCGCAGCTGGAAGAGAAAA | |
| | CGAACGAAACCTACGGTAAGCTGGAAGCGGTCCAGTACAAAACCC | |
| | AAGTGCTAGCAAACTGGAAACGTCATCATTACCATCGTTCCACCAA | |
| | CTATTACATTAAGGTTCGTGCCGGTGACAATAAGTATATGCACCTG | |
| | AAAGTGTTCAACGGCCCGCAGTGGTGGTTTCATAAACATGTTAAAG | |
| | CGGACCGTGTTCTGACCGGTTACCAGGTTGACAAGAACAAAGATG | |
| | ACGAGCTGACGGGTTTC | |
| FcRn-18 | ATGATCCCGCGTGGCCTGTCTGAAGCTAAACCAGCAACTCCGGAAA | 1068 |
| 1 | TTCAAGAGATCGTCGATAAGGTGAAACCGCAGCTGGAAGAGAAAA | |
| | CGAACGAAACCTACGGTAAGCTGGAAGCGGTCCAGTACAAAACCC | |
| | AAGTGCTAGCAACCCGTCATCATCATCGTAACCGTTTTTCCACCAA | |
| | CTATTACATTAAGGTTCGTGCCGGTGACAATAAGTATATGCACCTG | |
| | AAAGTGTTCAACGGCCCGATCTCTCATAACCCAAACCATTACCATG | |
| | CGGACCGTGTTCTGACCGGTTACCAGGTTGACAAGAACAAAGATG | |
| | ACGAGCTGACGGGTTTC | |
| FcRn-18 | ATGATCCCGCGTGGCCTGTCTGAAGCTAAACCAGCAACTCCGGAAA | 1069 |
| 2 | TTCAAGAGATCGTCGATAAGGTGAAACCGCAGCTGGAAGAGAAAA | |
| | CGAACGAAACCTACGGTAAGCTGGAAGCGGTCCAGTACAAAACCC | |
| | AAGTGCTAGCAGTTAAATGGGATTTTAAACATTTTTACTCCACCAA | |
| | CTATTACATTAAGGTTCGTGCCGGTGACAATAAGTATATGCACCTG | |
| | AAAGTGTTCAACGGCCCGACCAACCTGCATTCTCCAGATTCTCCAG | |
| | CGGACCGTGTTCTGACCGGTTACCAGGTTGACAAGAACAAAGATG | |
| | ACGAGCTGACGGGTTTC | |
| FcRn-18 | ATGATCCCGCGTGGCCTGTCTGAAGCTAAACCAGCAACTCCGGAAA | 1070 |
| 3 | TTCAAGAGATCGTCGATAAGGTGAAACCGCAGCTGGAAGAGAAAA | |
| | CGAACGAAACCTACGGTAAGCTGGAAGCGGTCCAGTACAAAACCC | |
| | AAGTGCTAGCATCTGATGATCTGTCTCCAGTTAAATGGTCCACCAA | |
| | CTATTACATTAAGGTTCGTGCCGGTGACAATAAGTATATGCACCTG | |
| | AAAGTGTTCAACGGCCCGTTTGATAAATACAACTCTCATTACCTGG | |
| | CGGACCGTGTTCTGACCGGTTACCAGGTTGACAAGAACAAAGATG | |
| | ACGAGCTGACGGGTTTC | |
| FcRn-18 | ATGATCCCGCGTGGCCTGTCTGAAGCTAAACCAGCAACTCCGGAAA | 1071 |
| 4 | TTCAAGAGATCGTCGATAAGGTGAAACCGCAGCTGGAAGAGAAAA | |
| | CGAACGAAACCTACGGTAAGCTGGAAGCGGTCCAGTACAAAACCC | |
| | AAGTGCTAGCACGTCATCGTCAGAAATGGCCAATCCATTCCACCAA | |
| | CTATTACATTAAGGTTCGTGCCGGTGACAATAAGTATATGCACCTG | |
| | AAAGTGTTCAACGGCCCGTCTACCCATCAGCAGAAACATCAGTGG | |
| | GCGGACCGTGTTCTGACCGGTTACCAGGTTGACAAGAACAAAGAT | |
| | GACGAGCTGACGGGTTTC | |
| FcRn-18 | ATGATCCCGCGTGGCCTGTCTGAAGCTAAACCAGCAACTCCGGAAA | 1072 |
| 5 | TTCAAGAGATCGTCGATAAGGTGAAACCGCAGCTGGAAGAGAAAA | |
| | CGAACGAAACCTACGGTAAGCTGGAAGCGGTCCAGTACAAAACCC | |
| | AAGTGCTAGCAGATCGTCATGCATACCATCGTCATTCCACCAACTA | |
| | TTACATTAAGGTTCGTGCCGGTGACAATAAGTATATGCACCTGAAA | |
| | GTGTTCAACGGCCCGTTTCATGAAGAAATCAAACATTGGCAGGCGG | |
| | ACCGTGTTCTGACCGGTTACCAGGTTGACAAGAACAAAGATGACG | |
| | AGCTGACGGGTTTC | |
| FcRn-18 | ATGATCCCGCGTGGCCTGTCTGAAGCTAAACCAGCAACTCCGGAAA | 1073 |
| 6 | TTCAAGAGATCGTCGATAAGGTGAAACCGCAGCTGGAAGAGAAAA | |
| | CGAACGAAACCTACGGTAAGCTGGAAGCGGTCCAGTACAAAACCC | |
| | AAGTGCTAGCACATCGTCATCATCAGAAACATGCATTTTCCACCAA | |
| | CTATTACATTAAGGTTCGTGCCGGTGACAATAAGTATATGCACCTG | |
| | AAAGTGTTCAACGGCCCGTGGCGTGATTGGAACCATCGTTTTCCAG | |
| | CGGACCGTGTTCTGACCGGTTACCAGGTTGACAAGAACAAAGATG | |
| | ACGAGCTGACGGGTTTC | |
| FcRn-18 | ATGATCCCGCGTGGCCTGTCTGAAGCTAAACCAGCAACTCCGGAAA | 1074 |
| 7 | TTCAAGAGATCGTCGATAAGGTGAAACCGCAGCTGGAAGAGAAAA | |
| | CGAACGAAACCTACGGTAAGCTGGAAGCGGTCCAGTACAAAACCC | |
| | AAGTGCTAGCACAGAAAGGTAAACATCATGATTACCGTTCCACCA | |
| | ACTATTACATTAAGGTTCGTGCCGGTGACAATAAGTATATGCACCT | |
| | GAAAGTGTTCAACGGCCCGAAACCACATCAGACCAAATGGCATCA | |
| | TGCGGACCGTGTTCTGACCGGTTACCAGGTTGACAAGAACAAAGAT | |
| | GACGAGCTGACGGGTTTC | |
| FcRn-18 | ATGATCCCGCGTGGCCTGTCTGAAGCTAAACCAGCAACTCCGGAAA | 1075 |
| 8 | TTCAAGAGATCGTCGATAAGGTGAAACCGCAGCTGGAAGAGAAAA | |
| | CGAACGAAACCTACGGTAAGCTGGAAGCGGTCCAGTACAAAACCC | |
| | AAGTGCTAGCATGGAACAAACATTTTTACAAACAGGGTTCCACCAA | |
| | CTATTACATTAAGGTTCGTGCCGGTGACAATAAGTATATGCACCTG | |
| | AAAGTGTTCAACGGCCCGCGTCATCATCGTCAGTCTCATCATTGGG | |
| | CGGACCGTGTTCTGACCGGTTACCAGGTTGACAAGAACAAAGATG | |
| | ACGAGCTGACGGGTTTC | |
| FcRn-18 | ATGATCCCGCGTGGCCTGTCTGAAGCTAAACCAGCAACTCCGGAAA | 1076 |
| 9 | TTCAAGAGATCGTCGATAAGGTGAAACCGCAGCTGGAAGAGAAAA | |
| | CGAACGAAACCTACGGTAAGCTGGAAGCGGTCCAGTACAAAACCC | |
| | AAGTGCTAGCAAAACGTCGTCATAACCGTGAATTTGTTTCCACCAA | |
| | CTATTACATTAAGGTTCGTGCCGGTGACAATAAGTATATGCACCTG | |
| | AAAGTGTTCAACGGCCCGATCCGTCATTACCATGCAGATCGTGAAG | |
| | CGGACCGTGTTCTGACCGGTTACCAGGTTGACAAGAACAAAGATG | |
| | ACGAGCTGACGGGTTTC | |
| FcRn-19 | ATGATCCCGCGTGGCCTGTCTGAAGCTAAACCAGCAACTCCGGAAA | 1077 |
| 0 | TTCAAGAGATCGTCGATAAGGTGAAACCGCAGCTGGAAGAGAAAA | |
| | CGAACGAAACCTACGGTAAGCTGGAAGCGGTCCAGTACAAAACCC | |
| | AAGTGCTAGCAACCCGTCATGTTCGTCATTGGACCCATTCCACCAA | |
| | CTATTACATTAAGGTTCGTGCCGGTGACAATAAGTATATGCACCTG | |
| | AAAGTGTTCAACGGCCCGGCATCTCAGGTTCCACCAAAACATCGTG | |
| | CGGACCGTGTTCTGACCGGTTACCAGGTTGACAAGAACAAAGATG | |
| | ACGAGCTGACGGGTTTC | |
| FcRn-19 | ATGATCCCGCGTGGCCTGTCTGAAGCTAAACCAGCAACTCCGGAAA | 1078 |
| 1 | TTCAAGAGATCGTCGATAAGGTGAAACCGCAGCTGGAAGAGAAAA | |
| | CGAACGAAACCTACGGTAAGCTGGAAGCGGTCCAGTACAAAACCC | |
| | AAGTGCTAGCAAACCGTAAATGGCAGCAGAACCATCATTCCACCA | |
| | ACTATTACATTAAGGTTCGTGCCGGTGACAATAAGTATATGCACCT | |
| | GAAAGTGTTCAACGGCCCGAAACATAAACATTGGCATCATCAGCT | |
| | GGCGGACCGTGTTCTGACCGGTTACCAGGTTGACAAGAACAAAGA | |
| | TGACGAGCTGACGGGTTTC | |
| FcRn-19 | ATGATCCCGCGTGGCCTGTCTGAAGCTAAACCAGCAACTCCGGAAA | 1079 |
| 2 | TTCAAGAGATCGTCGATAAGGTGAAACCGCAGCTGGAAGAGAAAA | |
| | CGAACGAAACCTACGGTAAGCTGGAAGCGGTCCAGTACAAAACCC | |
| | AAGTGCTAGCACGTCACCGTGAAAAACATCAGCCATACTCCACCA | |
| | ACTATTACATTAAGGTTCGTGCCGGTGACAATAAGTATATGCACCT | |
| | GAAAGTGTTCAACGGCCCGTGGGAACATCATCGTACCCGTTGGCAG | |
| | GCGGACCGTGTTCTGACCGGTTACCAGGTTGACAAGAACAAAGAT | |
| | GACGAGCTGACGGGTTTC | |
| FcRn-19 | ATGATCCCGCGTGGCCTGTCTGAAGCTAAACCAGCAACTCCGGAAA | 1080 |
| 3 | TTCAAGAGATCGTCGATAAGGTGAAACCGCAGCTGGAAGAGAAAA | |
| | CGAACGAAACCTACGGTAAGCTGGAAGCGGTCCAGTACAAAACCC | |
| | AAGTGCTAGCATACCATAAACATAACTCTAAACATTCTTCCACCAA | |
| | CTATTACATTAAGGTTCGTGCCGGTGACAATAAGTATATGCACCTG | |
| | AAAGTGTTCAACGGCCCGTTTAAAACCTTTAAAGAATGGCATGTTG | |
| | CGGACCGTGTTCTGACCGGTTACCAGGTTGACAAGAACAAAGATG | |
| | ACGAGCTGACGGGTTTC | |
| FcRn-19 | ATGATCCCGCGTGGCCTGTCTGAAGCTAAACCAGCAACTCCGGAAA | 1081 |
| 4 | TTCAAGAGATCGTCGATAAGGTGAAACCGCAGCTGGAAGAGAAAA | |
| | CGAACGAAACCTACGGTAAGCTGGAAGCGGTCCAGTACAAAACCC | |
| | AAGTGCTAGCACCAGCAGGTCAGCATAAACGTAAACATTCCACCA | |
| | ACTATTACATTAAGGTTCGTGCCGGTGACAATAAGTATATGCACCT | |
| | GAAAGTGTTCAACGGCCCGAAAGGTCATCGTTGGCATGATTTTAAA | |
| | GCGGACCGTGTTCTGACCGGTTACCAGGTTGACAAGAACAAAGAT | |
| | GACGAGCTGACGGGTTTC | |
| FcRn-19 | ATGATCCCGCGTGGCCTGTCTGAAGCTAAACCAGCAACTCCGGAAA | 1082 |
| 5 | TTCAAGAGATCGTCGATAAGGTGAAACCGCAGCTGGAAGAGAAAA | |
| | CGAACGAAACCTACGGTAAGCTGGAAGCGGTCCAGTACAAAACCC | |
| | AAGTGCTAGCAGATCGTCATAAATACCCAGTTCGTGTTTCCACCAA | |
| | CTATTACATTAAGGTTCGTGCCGGTGACAATAAGTATATGCACCTG | |
| | AAAGTGTTCAACGGCCCGAAACATGCATGGCAGCATCATAAATCT | |
| | GCGGACCGTGTTCTGACCGGTTACCAGGTTGACAAGAACAAAGAT | |
| | GACGAGCTGACGGGTTTC | |
| FcRn-19 | ATGATCCCGCGTGGCCTGTCTGAAGCTAAACCAGCAACTCCGGAAA | 1083 |
| 6 | TTCAAGAGATCGTCGATAAGGTGAAACCGCAGCTGGAAGAGAAAA | |
| | CGAACGAAACCTACGGTAAGCTGGAAGCGGTCCAGTACAAAACCC | |
| | AAGTGCTAGCAGGTAACAACAACCCACAGGGTCATGTTTCCACCA | |
| | ACTATTACATTAAGGTTCGTGCCGGTGACAATAAGTATATGCACCT | |
| | GAAAGTGTTCAACGGCCCGTACAAACATTTTAAACATCATTGGCGT | |
| | GCGGACCGTGTTCTGACCGGTTACCAGGTTGACAAGAACAAAGAT | |
| | GACGAGCTGACGGGTTTC | |
| FcRn-19 | ATGATCCCGCGTGGCCTGTCTGAAGCTAAACCAGCAACTCCGGAAA | 1084 |
| 7 | TTCAAGAGATCGTCGATAAGGTGAAACCGCAGCTGGAAGAGAAAA | |
| | CGAACGAAACCTACGGTAAGCTGGAAGCGGTCCAGTACAAAACCC | |
| | AAGTGCTAGCAAAACAGCTGCATCATCATCATTACAAATCCACCAA | |
| | CTATTACATTAAGGTTCGTGCCGGTGACAATAAGTATATGCACCTG | |
| | AAAGTGTTCAACGGCCCGGCACATCGTAAATTTTTTCAGTGGCATG | |
| | CGGACCGTGTTCTGACCGGTTACCAGGTTGACAAGAACAAAGATG | |
| | ACGAGCTGACGGGTTTC | |
| FcRn-19 | ATGATCCCGCGTGGCCTGTCTGAAGCTAAACCAGCAACTCCGGAAA | 1085 |
| 8 | TTCAAGAGATCGTCGATAAGGTGAAACCGCAGCTGGAAGAGAAAA | |
| | CGAACGAAACCTACGGTAAGCTGGAAGCGGTCCAGTACAAAACCC | |
| | AAGTGCTAGCACAGAAACATAACTGGCATCGTTGGCATTCCACCAA | |
| | CTATTACATTAAGGTTCGTGCCGGTGACAATAAGTATATGCACCTG | |
| | AAAGTGTTCAACGGCCCGTGGACCCATCGTTCTCAGGTTAAAGTTG | |
| | CGGACCGTGTTCTGACCGGTTACCAGGTTGACAAGAACAAAGATG | |
| | ACGAGCTGACGGGTTTC | |
| FcRn-19 | ATGATCCCGCGTGGCCTGTCTGAAGCTAAACCAGCAACTCCGGAAA | 1086 |
| 9 | TTCAAGAGATCGTCGATAAGGTGAAACCGCAGCTGGAAGAGAAAA | |
| | CGAACGAAACCTACGGTAAGCTGGAAGCGGTCCAGTACAAAACCC | |
| | AAGTGCTAGCATACAAACATCTGGGTTACTGGCAGAAATCCACCA | |
| | ACTATTACATTAAGGTTCGTGCCGGTGACAATAAGTATATGCACCT | |
| | GAAAGTGTTCAACGGCCCGTTTCAGTGGTTTAAAGTTGGTGTTCCA | |
| | GCGGACCGTGTTCTGACCGGTTACCAGGTTGACAAGAACAAAGAT | |
| | GACGAGCTGACGGGTTTC | |
| FcRn-20 | ATGATCCCGCGTGGCCTGTCTGAAGCTAAACCAGCAACTCCGGAAA | 1087 |
| 0 | TTCAAGAGATCGTCGATAAGGTGAAACCGCAGCTGGAAGAGAAAA | |
| | CGAACGAAACCTACGGTAAGCTGGAAGCGGTCCAGTACAAAACCC | |
| | AAGTGCTAGCACATCAGAAAAACTTTGAAGCATGGGAATCCACCA | |
| | ACTATTACATTAAGGTTCGTGCCGGTGACAATAAGTATATGCACCT | |
| | GAAAGTGTTCAACGGCCCGGTTCGTTACTACTCTAAATACCAGTGG | |
| | GCGGACCGTGTTCTGACCGGTTACCAGGTTGACAAGAACAAAGAT | |
| | GACGAGCTGACGGGTTTC | |
| FcRn-20 | ATGATCCCGCGTGGCCTGTCTGAAGCTAAACCAGCAACTCCGGAAA | 1088 |
| 1 | TTCAAGAGATCGTCGATAAGGTGAAACCGCAGCTGGAAGAGAAAA | |
| | CGAACGAAACCTACGGTAAGCTGGAAGCGGTCCAGTACAAAACCC | |
| | AAGTGCTAGCAGAACGTGTTCGTCGTCGTCATCCACCATCCACCAA | |
| | CTATTACATTAAGGTTCGTGCCGGTGACAATAAGTATATGCACCTG | |
| | AAAGTGTTCAACGGCCCGAACGGTTGGCATGTTGGTCATCATATCG | |
| | CGGACCGTGTTCTGACCGGTTACCAGGTTGACAAGAACAAAGATG | |
| | ACGAGCTGACGGGTTTC | |
| FcRn-20 | ATGATCCCGCGTGGCCTGTCTGAAGCTAAACCAGCAACTCCGGAAA | 1089 |
| 2 | TTCAAGAGATCGTCGATAAGGTGAAACCGCAGCTGGAAGAGAAAA | |
| | CGAACGAAACCTACGGTAAGCTGGAAGCGGTCCAGTACAAAACCC | |
| | AAGTGCTAGCACATAAAGTTCATATCTTTCGTGAACCATCCACCAA | |
| | CTATTACATTAAGGTTCGTGCCGGTGACAATAAGTATATGCACCTG | |
| | AAAGTGTTCAACGGCCCGACCCGTTTTCGTCATTACCTGGTTACCG | |
| | CGGACCGTGTTCTGACCGGTTACCAGGTTGACAAGAACAAAGATG | |
| | ACGAGCTGACGGGTTTC | |
| FcRn-20 | ATGATCCCGCGTGGCCTGTCTGAAGCTAAACCAGCAACTCCGGAAA | 1090 |
| 3 | TTCAAGAGATCGTCGATAAGGTGAAACCGCAGCTGGAAGAGAAAA | |
| | CGAACGAAACCTACGGTAAGCTGGAAGCGGTCCAGTACAAAACCC | |
| | AAGTGCTAGCAGTTAAATCTTTTCATGTTCATTCTCATTCCACCAAC | |
| | TATTACATTAAGGTTCGTGCCGGTGACAATAAGTATATGCACCTGA | |
| | AAGTGTTCAACGGCCCGTCTTGGCGTAACGTTCGTCCAGAATTTGC | |
| | GGACCGTGTTCTGACCGGTTACCAGGTTGACAAGAACAAAGATGA | |
| | CGAGCTGACGGGTTTC | |
| FcRn-20 | ATGATCCCGCGTGGCCTGTCTGAAGCTAAACCAGCAACTCCGGAAA | 1091 |
| 4 | TTCAAGAGATCGTCGATAAGGTGAAACCGCAGCTGGAAGAGAAAA | |
| | CGAACGAAACCTACGGTAAGCTGGAAGCGGTCCAGTACAAAACCC | |
| | AAGTGCTAGCATGGCATAAAGATCCACCACCACCATGGTCCACCA | |
| | ACTATTACATTAAGGTTCGTGCCGGTGACAATAAGTATATGCACCT | |
| | GAAAGTGTTCAACGGCCCGTTTGGTCATACCTTTTCTTGGCGTTACG | |
| | CGGACCGTGTTCTGACCGGTTACCAGGTTGACAAGAACAAAGATG | |
| | ACGAGCTGACGGGTTTC | |
| FcRn-20 | ATGATCCCGCGTGGCCTGTCTGAAGCTAAACCAGCAACTCCGGAAA | 1092 |
| 5 | TTCAAGAGATCGTCGATAAGGTGAAACCGCAGCTGGAAGAGAAAA | |
| | CGAACGAAACCTACGGTAAGCTGGAAGCGGTCCAGTACAAAACCC | |
| | AAGTGCTAGCACATCGTTACGCACATAACCATTTTCTGTCCACCAA | |
| | CTATTACATTAAGGTTCGTGCCGGTGACAATAAGTATATGCACCTG | |
| | AAAGTGTTCAACGGCCCGTTTAAACATCAGAAATTTTACCGTGATG | |
| | CGGACCGTGTTCTGACCGGTTACCAGGTTGACAAGAACAAAGATG | |
| | ACGAGCTGACGGGTTTC | |
| FcRn-20 | ATGATCCCGCGTGGCCTGTCTGAAGCTAAACCAGCAACTCCGGAAA | 1093 |
| 6 | TTCAAGAGATCGTCGATAAGGTGAAACCGCAGCTGGAAGAGAAAA | |
| | CGAACGAAACCTACGGTAAGCTGGAAGCGGTCCAGTACAAAACCC | |
| | AAGTGCTAGCAGTTTCTCATGCACTGAAAACCCATACCTCCACCAA | |
| | CTATTACATTAAGGTTCGTGCCGGTGACAATAAGTATATGCACCTG | |
| | AAAGTGTTCAACGGCCCGTGGCGTAACAAATGGCGTGCACAGGAT | |
| | GCGGACCGTGTTCTGACCGGTTACCAGGTTGACAAGAACAAAGAT | |
| | GACGAGCTGACGGGTTTC | |
| FcRn-20 | ATGATCCCGCGTGGCCTGTCTGAAGCTAAACCAGCAACTCCGGAAA | 1094 |
| 7 | TTCAAGAGATCGTCGATAAGGTGAAACCGCAGCTGGAAGAGAAAA | |
| | CGAACGAAACCTACGGTAAGCTGGAAGCGGTCCAGTACAAAACCC | |
| | AAGTGCTAGCACATCAGTCTCGTGCAATCTACGTTTACTCCACCAA | |
| | CTATTACATTAAGGTTCGTGCCGGTGACAATAAGTATATGCACCTG | |
| | AAAGTGTTCAACGGCCCGTACCAGAAATCTTACTTTCATCGTCATG | |
| | CGGACCGTGTTCTGACCGGTTACCAGGTTGACAAGAACAAAGATG | |
| | ACGAGCTGACGGGTTTC | |
| FcRn-20 | ATGATCCCGCGTGGCCTGTCTGAAGCTAAACCAGCAACTCCGGAAA | 1095 |
| 8 | TTCAAGAGATCGTCGATAAGGTGAAACCGCAGCTGGAAGAGAAAA | |
| | CGAACGAAACCTACGGTAAGCTGGAAGCGGTCCAGTACAAAACCC | |
| | AAGTGCTAGCACATCATACCACCTACCATCAGCACCATTCCACCAA | |
| | CTATTACATTAAGGTTCGTGCCGGTGACAATAAGTATATGCACCTG | |
| | AAAGTGTTCAACGGCCCGTGGCGTCCACGTCCAGTTCATTGGAAAG | |
| | CGGACCGTGTTCTGACCGGTTACCAGGTTGACAAGAACAAAGATG | |
| | ACGAGCTGACGGGTTTC | |
| FcRn-20 | ATGATCCCGCGTGGCCTGTCTGAAGCTAAACCAGCAACTCCGGAAA | 1096 |
| 9 | TTCAAGAGATCGTCGATAAGGTGAAACCGCAGCTGGAAGAGAAAA | |
| | CGAACGAAACCTACGGTAAGCTGGAAGCGGTCCAGTACAAAACCC | |
| | AAGTGCTAGCAACCTGGTGGCGTAACGTTCAGCATCATTCCACCAA | |
| | CTATTACATTAAGGTTCGTGCCGGTGACAATAAGTATATGCACCTG | |
| | AAAGTGTTCAACGGCCCGGATCCACAGTACAAACGTCATGGTTACG | |
| | CGGACCGTGTTCTGACCGGTTACCAGGTTGACAAGAACAAAGATG | |
| | ACGAGCTGACGGGTTTC | |
| FcRn-21 | ATGATCCCGCGTGGCCTGTCTGAAGCTAAACCAGCAACTCCGGAAA | 1097 |
| 0 | TTCAAGAGATCGTCGATAAGGTGAAACCGCAGCTGGAAGAGAAAA | |
| | CGAACGAAACCTACGGTAAGCTGGAAGCGGTCCAGTACAAAACCC | |
| | AAGTGCTAGCATGGAACAAACATAACTACCAGCATCAGTCCACCA | |
| | ACTATTACATTAAGGTTCGTGCCGGTGACAATAAGTATATGCACCT | |
| | GAAAGTGTTCAACGGCCCGGTTCCACATTCTGTTGTTCATTACAAA | |
| | GCGGACCGTGTTCTGACCGGTTACCAGGTTGACAAGAACAAAGAT | |
| | GACGAGCTGACGGGTTTC | |
| FcRn-21 | ATGATCCCGCGTGGCCTGTCTGAAGCTAAACCAGCAACTCCGGAAA | 1098 |
| 1 | TTCAAGAGATCGTCGATAAGGTGAAACCGCAGCTGGAAGAGAAAA | |
| | CGAACGAAACCTACGGTAAGCTGGAAGCGGTCCAGTACAAAACCC | |
| | AAGTGCTAGCACAGCATACCCTGCGTGTTCATACCGTTTCCACCAA | |
| | CTATTACATTAAGGTTCGTGCCGGTGACAATAAGTATATGCACCTG | |
| | AAAGTGTTCAACGGCCCGGCATACTCTCAGTCTTTTATCCATCATG | |
| | CGGACCGTGTTCTGACCGGTTACCAGGTTGACAAGAACAAAGATG | |
| | ACGAGCTGACGGGTTTC | |
| FcRn-21 | ATGATCCCGCGTGGCCTGTCTGAAGCTAAACCAGCAACTCCGGAAA | 1099 |
| 2 | TTCAAGAGATCGTCGATAAGGTGAAACCGCAGCTGGAAGAGAAAA | |
| | CGAACGAAACCTACGGTAAGCTGGAAGCGGTCCAGTACAAAACCC | |
| | AAGTGCTAGCAAACCAGCATTTTCATCAGGCAGGTCATTCCACCAA | |
| | CTATTACATTAAGGTTCGTGCCGGTGACAATAAGTATATGCACCTG | |
| | AAAGTGTTCAACGGCCCGTTTTCTCATTCTACCTGGCGTTACCATGC | |
| | GGACCGTGTTCTGACCGGTTACCAGGTTGACAAGAACAAAGATGA | |
| | CGAGCTGACGGGTTTC | |
| FcRn-21 | ATGATCCCGCGTGGCCTGTCTGAAGCTAAACCAGCAACTCCGGAAA | 1100 |
| 3 | TTCAAGAGATCGTCGATAAGGTGAAACCGCAGCTGGAAGAGAAAA | |
| | CGAACGAAACCTACGGTAAGCTGGAAGCGGTCCAGTACAAAACCC | |
| | AAGTGCTAGCACGTCAGTGGACCGATCGTGTTTGGGTTTCCACCAA | |
| | CTATTACATTAAGGTTCGTGCCGGTGACAATAAGTATATGCACCTG | |
| | AAAGTGTTCAACGGCCCGTCTAAAAAACATCAGCAGCATTGGGCG | |
| | GACCGTGTTCTGACCGGTTACCAGGTTGACAAGAACAAAGATGAC | |
| | GAGCTGACGGGTTTC | |
| FcRn-21 | ATGATCCCGCGTGGCCTGTCTGAAGCTAAACCAGCAACTCCGGAAA | 1101 |
| 4 | TTCAAGAGATCGTCGATAAGGTGAAACCGCAGCTGGAAGAGAAAA | |
| | CGAACGAAACCTACGGTAAGCTGGAAGCGGTCCAGTACAAAACCC | |
| | AAGTGCTAGCAGATCATGATTACTTTCATCATAACAAATCCACCAA | |
| | CTATTACATTAAGGTTCGTGCCGGTGACAATAAGTATATGCACCTG | |
| | AAAGTGTTCAACGGCCCGGCAAAACATCCACGTATCCATGTTACCG | |
| | CGGACCGTGTTCTGACCGGTTACCAGGTTGACAAGAACAAAGATG | |
| | ACGAGCTGACGGGTTTC | |
| FcRn-21 | ATGATCCCGCGTGGCCTGTCTGAAGCTAAACCAGCAACTCCGGAAA | 1102 |
| 5 | TTCAAGAGATCGTCGATAAGGTGAAACCGCAGCTGGAAGAGAAAA | |
| | CGAACGAAACCTACGGTAAGCTGGAAGCGGTCCAGTACAAAACCC | |
| | AAGTGCTAGCATACTGGGATGTTGGTCCAGGTTTTAACTCCACCAA | |
| | CTATTACATTAAGGTTCGTGCCGGTGACAATAAGTATATGCACCTG | |
| | AAAGTGTTCAACGGCCCGTCTCCATGGCATCATCCAACCCATTTTG | |
| | CGGACCGTGTTCTGACCGGTTACCAGGTTGACAAGAACAAAGATG | |
| | ACGAGCTGACGGGTTTC | |
| FcRn-21 | ATGATCCCGCGTGGCCTGTCTGAAGCTAAACCAGCAACTCCGGAAA | 1103 |
| 6 | TTCAAGAGATCGTCGATAAGGTGAAACCGCAGCTGGAAGAGAAAA | |
| | CGAACGAAACCTACGGTAAGCTGGAAGCGGTCCAGTACAAAACCC | |
| | AAGTGCTAGCAGGTATCCATGGTCATCATGAATACTACTCCACCAA | |
| | CTATTACATTAAGGTTCGTGCCGGTGACAATAAGTATATGCACCTG | |
| | AAAGTGTTCAACGGCCCGTCTAACTGGTTTCATCATAAACATCGTG | |
| | CGGACCGTGTTCTGACCGGTTACCAGGTTGACAAGAACAAAGATG | |
| | ACGAGCTGACGGGTTTC | |
| FcRn-21 | ATGATCCCGCGTGGCCTGTCTGAAGCTAAACCAGCAACTCCGGAAA | 1104 |
| 7 | TTCAAGAGATCGTCGATAAGGTGAAACCGCAGCTGGAAGAGAAAA | |
| | CGAACGAAACCTACGGTAAGCTGGAAGCGGTCCAGTACAAAACCC | |
| | AAGTGCTAGCATGGCAGCGTTCTCGTTACGGTAAATACTCCACCAA | |
| | CTATTACATTAAGGTTCGTGCCGGTGACAATAAGTATATGCACCTG | |
| | AAAGTGTTCAACGGCCCGGCATACTGGCCATACCAGAAACCAACC | |
| | GCGGACCGTGTTCTGACCGGTTACCAGGTTGACAAGAACAAAGAT | |
| | GACGAGCTGACGGGTTTC | |
| FcRn-21 | ATGATCCCGCGTGGCCTGTCTGAAGCTAAACCAGCAACTCCGGAAA | 1105 |
| 8 | TTCAAGAGATCGTCGATAAGGTGAAACCGCAGCTGGAAGAGAAAA | |
| | CGAACGAAACCTACGGTAAGCTGGAAGCGGTCCAGTACAAAACCC | |
| | AAGTGCTAGCATACCATCAGCAGCATTGGCGTGTTCATTCCACCAA | |
| | CTATTACATTAAGGTTCGTGCCGGTGACAATAAGTATATGCACCTG | |
| | AAAGTGTTCAACGGCCCGATCCTGGTTGGTTACAACTGGCATTACG | |
| | CGGACCGTGTTCTGACCGGTTACCAGGTTGACAAGAACAAAGATG | |
| | ACGAGCTGACGGGTTTC | |
| FcRn-21 | ATGATCCCGCGTGGCCTGTCTGAAGCTAAACCAGCAACTCCGGAAA | 1106 |
| 9 | TTCAAGAGATCGTCGATAAGGTGAAACCGCAGCTGGAAGAGAAAA | |
| | CGAACGAAACCTACGGTAAGCTGGAAGCGGTCCAGTACAAAACCC | |
| | AAGTGCTAGCAGCAACCCGTAACTCTTACCCACGTCATTCCACCAA | |
| | CTATTACATTAAGGTTCGTGCCGGTGACAATAAGTATATGCACCTG | |
| | AAAGTGTTCAACGGCCCGGTTCATTCTCATCTGCCACGTCATCCAG | |
| | CGGACCGTGTTCTGACCGGTTACCAGGTTGACAAGAACAAAGATG | |
| | ACGAGCTGACGGGTTTC | |
| FcRn-22 | ATGATCCCGCGTGGCCTGTCTGAAGCTAAACCAGCAACTCCGGAAA | 1107 |
| 0 | TTCAAGAGATCGTCGATAAGGTGAAACCGCAGCTGGAAGAGAAAA | |
| | CGAACGAAACCTACGGTAAGCTGGAAGCGGTCCAGTACAAAACCC | |
| | AAGTGCTAGCAGAACATCATCATGCACATTGGGCAACCTCCACCAA | |
| | CTATTACATTAAGGTTCGTGCCGGTGACAATAAGTATATGCACCTG | |
| | AAAGTGTTCAACGGCCCGCTGTTTCTGCATGGTGTTCATATCTTTGC | |
| | GGACCGTGTTCTGACCGGTTACCAGGTTGACAAGAACAAAGATGA | |
| | CGAGCTGACGGGTTTC | |
| FcRn-22 | ATGATCCCGCGTGGCCTGTCTGAAGCTAAACCAGCAACTCCGGAAA | 1108 |
| 1 | TTCAAGAGATCGTCGATAAGGTGAAACCGCAGCTGGAAGAGAAAA | |
| | CGAACGAAACCTACGGTAAGCTGGAAGCGGTCCAGTACAAAACCC | |
| | AAGTGCTAGCAAAACAGCATCAGCGTTCTTTTATCATCTCCACCAA | |
| | CTATTACATTAAGGTTCGTGCCGGTGACAATAAGTATATGCACCTG | |
| | AAAGTGTTCAACGGCCCGACCTCTCTGCCATCTGAATGGTTTCAGG | |
| | CGGACCGTGTTCTGACCGGTTACCAGGTTGACAAGAACAAAGATG | |
| | ACGAGCTGACGGGTTTC | |
| FcRn-22 | ATGATCCCGCGTGGCCTGTCTGAAGCTAAACCAGCAACTCCGGAAA | 1109 |
| 2 | TTCAAGAGATCGTCGATAAGGTGAAACCGCAGCTGGAAGAGAAAA | |
| | CGAACGAAACCTACGGTAAGCTGGAAGCGGTCCAGTACAAAACCC | |
| | AAGTGCTAGCACAGTTTTGGGGTCATCGTGTTGAACATTCCACCAA | |
| | CTATTACATTAAGGTTCGTGCCGGTGACAATAAGTATATGCACCTG | |
| | AAAGTGTTCAACGGCCCGACCCGTCATTACCATCAGCGTAACCGTG | |
| | CGGACCGTGTTCTGACCGGTTACCAGGTTGACAAGAACAAAGATG | |
| | ACGAGCTGACGGGTTTC | |
| FcRn-22 | ATGATCCCGCGTGGCCTGTCTGAAGCTAAACCAGCAACTCCGGAAA | 1110 |
| 3 | TTCAAGAGATCGTCGATAAGGTGAAACCGCAGCTGGAAGAGAAAA | |
| | CGAACGAAACCTACGGTAAGCTGGAAGCGGTCCAGTACAAAACCC | |
| | AAGTGCTAGCATTTCCATCTTCTCATCGTACCTCTTACTCCACCAAC | |
| | TATTACATTAAGGTTCGTGCCGGTGACAATAAGTATATGCACCTGA | |
| | AAGTGTTCAACGGCCCGTACTCTGCACATCATATCCGTTGGCATGC | |
| | GGACCGTGTTCTGACCGGTTACCAGGTTGACAAGAACAAAGATGA | |
| | CGAGCTGACGGGTTTC | |
| FcRn-22 | ATGATCCCGCGTGGCCTGTCTGAAGCTAAACCAGCAACTCCGGAAA | mi |
| 4 | TTCAAGAGATCGTCGATAAGGTGAAACCGCAGCTGGAAGAGAAAA | |
| | CGAACGAAACCTACGGTAAGCTGGAAGCGGTCCAGTACAAAACCC | |
| | AAGTGCTAGCATCTTCTAAATACATCGATCATCGTCAGTCCACCAA | |
| | CTATTACATTAAGGTTCGTGCCGGTGACAATAAGTATATGCACCTG | |
| | AAAGTGTTCAACGGCCCGGAACGTGCACAGCATCATACCCATCCA | |
| | GCGGACCGTGTTCTGACCGGTTACCAGGTTGACAAGAACAAAGAT | |
| | GACGAGCTGACGGGTTTC | |
| FcRn-22 | ATGATCCCGCGTGGCCTGTCTGAAGCTAAACCAGCAACTCCGGAAA | 1112 |
| 5 | TTCAAGAGATCGTCGATAAGGTGAAACCGCAGCTGGAAGAGAAAA | |
| | CGAACGAAACCTACGGTAAGCTGGAAGCGGTCCAGTACAAAACCC | |
| | AAGTGCTAGCATACTGGCGTCATGAACATTCTTCTCCATCCACCAA | |
| | CTATTACATTAAGGTTCGTGCCGGTGACAATAAGTATATGCACCTG | |
| | AAAGTGTTCAACGGCCCGTGGAAAAAACATCATTACGGTCATTACG | |
| | CGGACCGTGTTCTGACCGGTTACCAGGTTGACAAGAACAAAGATG | |
| | ACGAGCTGACGGGTTTC | |
| FcRn-22 | ATGATCCCGCGTGGCCTGTCTGAAGCTAAACCAGCAACTCCGGAAA | 1113 |
| 6 | TTCAAGAGATCGTCGATAAGGTGAAACCGCAGCTGGAAGAGAAAA | |
| | CGAACGAAACCTACGGTAAGCTGGAAGCGGTCCAGTACAAAACCC | |
| | AAGTGCTAGCAGAACGTGCACATTACGATCATCATTACTCCACCAA | |
| | CTATTACATTAAGGTTCGTGCCGGTGACAATAAGTATATGCACCTG | |
| | AAAGTGTTCAACGGCCCGTCTCATCATGCACATCATTCTGTTCAGG | |
| | CGGACCGTGTTCTGACCGGTTACCAGGTTGACAAGAACAAAGATG | |
| | ACGAGCTGACGGGTTTC | |
| FcRn-22 | ATGATCCCGCGTGGCCTGTCTGAAGCTAAACCAGCAACTCCGGAAA | 1114 |
| 7 | TTCAAGAGATCGTCGATAAGGTGAAACCGCAGCTGGAAGAGAAAA | |
| | CGAACGAAACCTACGGTAAGCTGGAAGCGGTCCAGTACAAAACCC | |
| | AAGTGCTAGCATGGCGTCATAAAGCATACATCTACGGTTCCACCAA | |
| | CTATTACATTAAGGTTCGTGCCGGTGACAATAAGTATATGCACCTG | |
| | AAAGTGTTCAACGGCCCGTGGAAACATTGGGAACATAAACCACAG | |
| | GCGGACCGTGTTCTGACCGGTTACCAGGTTGACAAGAACAAAGAT | |
| | GACGAGCTGACGGGTTTC | |
| FcRn-22 | ATGATCCCGCGTGGCCTGTCTGAAGCTAAACCAGCAACTCCGGAAA | 1115 |
| 8 | TTCAAGAGATCGTCGATAAGGTGAAACCGCAGCTGGAAGAGAAAA | |
| | CGAACGAAACCTACGGTAAGCTGGAAGCGGTCCAGTACAAAACCC | |
| | AAGTGCTAGCACCACAGATCAAAGAACAGTACAACGGTTCCACCA | |
| | ACTATTACATTAAGGTTCGTGCCGGTGACAATAAGTATATGCACCT | |
| | GAAAGTGTTCAACGGCCCGGCACAGGTTCCAGTTCTGCTGTGGTAC | |
| | GCGGACCGTGTTCTGACCGGTTACCAGGTTGACAAGAACAAAGAT | |
| | GACGAGCTGACGGGTTTC | |
| FcRn-22 | ATGATCCCGCGTGGCCTGTCTGAAGCTAAACCAGCAACTCCGGAAA | 1116 |
| 9 | TTCAAGAGATCGTCGATAAGGTGAAACCGCAGCTGGAAGAGAAAA | |
| | CGAACGAAACCTACGGTAAGCTGGAAGCGGTCCAGTACAAAACCC | |
| | AAGTGCTAGCATTTAAAAAAGTTGCACGTGATCATTGGTCCACCAA | |
| | CTATTACATTAAGGTTCGTGCCGGTGACAATAAGTATATGCACCTG | |
| | AAAGTGTTCAACGGCCCGTGGGTTCATTTTTACCCATGGCAGCAGG | |
| | CGGACCGTGTTCTGACCGGTTACCAGGTTGACAAGAACAAAGATG | |
| | ACGAGCTGACGGGTTTC | |
| FcRn-23 | ATGATCCCGCGTGGCCTGTCTGAAGCTAAACCAGCAACTCCGGAAA | 1117 |
| 0 | TTCAAGAGATCGTCGATAAGGTGAAACCGCAGCTGGAAGAGAAAA | |
| | CGAACGAAACCTACGGTAAGCTGGAAGCGGTCCAGTACAAAACCC | |
| | AAGTGCTAGCAGCACAGAAACATCATTGGCACAAAACCTCCACCA | |
| | ACTATTACATTAAGGTTCGTGCCGGTGACAATAAGTATATGCACCT | |
| | GAAAGTGTTCAACGGCCCGTGGCATCTGGCACATGTTTTTTACACC | |
| | GCGGACCGTGTTCTGACCGGTTACCAGGTTGACAAGAACAAAGAT | |
| | GACGAGCTGACGGGTTTC | |
| FcRn-23 | ATGATCCCGCGTGGCCTGTCTGAAGCTAAACCAGCAACTCCGGAAA | 1118 |
| 1 | TTCAAGAGATCGTCGATAAGGTGAAACCGCAGCTGGAAGAGAAAA | |
| | CGAACGAAACCTACGGTAAGCTGGAAGCGGTCCAGTACAAAACCC | |
| | AAGTGCTAGCAGTTTCTCAGGGTCATCATTCTTGGGATTCCACCAA | |
| | CTATTACATTAAGGTTCGTGCCGGTGACAATAAGTATATGCACCTG | |
| | AAAGTGTTCAACGGCCCGTCTTCTCATCATCATAAAAACCATCATG | |
| | CGGACCGTGTTCTGACCGGTTACCAGGTTGACAAGAACAAAGATG | |
| | ACGAGCTGACGGGTTTC | |
| FcRn-23 | ATGATCCCGCGTGGCCTGTCTGAAGCTAAACCAGCAACTCCGGAAA | 1119 |
| 2 | TTCAAGAGATCGTCGATAAGGTGAAACCGCAGCTGGAAGAGAAAA | |
| | CGAACGAAACCTACGGTAAGCTGGAAGCGGTCCAGTACAAAACCC | |
| | AAGTGCTAGCATGGCATCTGCGTGGTCATCCACATTACTCCACCAA | |
| | CTATTACATTAAGGTTCGTGCCGGTGACAATAAGTATATGCACCTG | |
| | AAAGTGTTCAACGGCCCGACCAAACAGCCACATGGTGTTCATTACG | |
| | CGGACCGTGTTCTGACCGGTTACCAGGTTGACAAGAACAAAGATG | |
| | ACGAGCTGACGGGTTTC | |
| FcRn-23 | ATGATCCCGCGTGGCCTGTCTGAAGCTAAACCAGCAACTCCGGAAA | 1120 |
| 3 | TTCAAGAGATCGTCGATAAGGTGAAACCGCAGCTGGAAGAGAAAA | |
| | CGAACGAAACCTACGGTAAGCTGGAAGCGGTCCAGTACAAAACCC | |
| | AAGTGCTAGCACATTCTCATCATCATCAGCCATGGGAATCCACCAA | |
| | CTATTACATTAAGGTTCGTGCCGGTGACAATAAGTATATGCACCTG | |
| | AAAGTGTTCAACGGCCCGGAACATCGTACCCATCATCTGGGTAAAG | |
| | CGGACCGTGTTCTGACCGGTTACCAGGTTGACAAGAACAAAGATG | |
| | ACGAGCTGACGGGTTTC | |
| FcRn-23 | ATGATCCCGCGTGGCCTGTCTGAAGCTAAACCAGCAACTCCGGAAA | 1121 |
| 4 | TTCAAGAGATCGTCGATAAGGTGAAACCGCAGCTGGAAGAGAAAA | |
| | CGAACGAAACCTACGGTAAGCTGGAAGCGGTCCAGTACAAAACCC | |
| | AAGTGCTAGCACGTCGTTTTCGTGTTCATCTGCATCAGTCCACCAA | |
| | CTATTACATTAAGGTTCGTGCCGGTGACAATAAGTATATGCACCTG | |
| | AAAGTGTTCAACGGCCCGACCAACCATCGTCAGGATCATCCAGAA | |
| | GCGGACCGTGTTCTGACCGGTTACCAGGTTGACAAGAACAAAGAT | |
| | GACGAGCTGACGGGTTTC | |
| FcRn-23 | ATGATCCCGCGTGGCCTGTCTGAAGCTAAACCAGCAACTCCGGAAA | 1122 |
| 5 | TTCAAGAGATCGTCGATAAGGTGAAACCGCAGCTGGAAGAGAAAA | |
| | CGAACGAAACCTACGGTAAGCTGGAAGCGGTCCAGTACAAAACCC | |
| | AAGTGCTAGCAGGTCGTCAGACCAAATCTCATCAGCATTCCACCAA | |
| | CTATTACATTAAGGTTCGTGCCGGTGACAATAAGTATATGCACCTG | |
| | AAAGTGTTCAACGGCCCGCATCGTAAAACCAACTGGCATTCTTACG | |
| | CGGACCGTGTTCTGACCGGTTACCAGGTTGACAAGAACAAAGATG | |
| | ACGAGCTGACGGGTTTC | |
| FcRn-23 | ATGATCCCGCGTGGCCTGTCTGAAGCTAAACCAGCAACTCCGGAAA | 1123 |
| 6 | TTCAAGAGATCGTCGATAAGGTGAAACCGCAGCTGGAAGAGAAAA | |
| | CGAACGAAACCTACGGTAAGCTGGAAGCGGTCCAGTACAAAACCC | |
| | AAGTGCTAGCACCATACTCTCGTCATCATCATCAGCTGTCCACCAA | |
| | CTATTACATTAAGGTTCGTGCCGGTGACAATAAGTATATGCACCTG | |
| | AAAGTGTTCAACGGCCCGTCTGGTGTTCATCATGCAGCAGTTTGGG | |
| | CGGACCGTGTTCTGACCGGTTACCAGGTTGACAAGAACAAAGATG | |
| | ACGAGCTGACGGGTTTC | |
| FcRn-23 | ATGATCCCGCGTGGCCTGTCTGAAGCTAAACCAGCAACTCCGGAAA | 1124 |
| 7 | TTCAAGAGATCGTCGATAAGGTGAAACCGCAGCTGGAAGAGAAAA | |
| | CGAACGAAACCTACGGTAAGCTGGAAGCGGTCCAGTACAAAACCC | |
| | AAGTGCTAGCAGTTCATGGTGATCATACCCGTGCATGGTCCACCAA | |
| | CTATTACATTAAGGTTCGTGCCGGTGACAATAAGTATATGCACCTG | |
| | AAAGTGTTCAACGGCCCGCGTTACGCATCTTCTTACTGGGAATGGG | |
| | CGGACCGTGTTCTGACCGGTTACCAGGTTGACAAGAACAAAGATG | |
| | ACGAGCTGACGGGTTTC | |
| FcRn-23 | ATGATCCCGCGTGGCCTGTCTGAAGCTAAACCAGCAACTCCGGAAA | 1125 |
| 8 | TTCAAGAGATCGTCGATAAGGTGAAACCGCAGCTGGAAGAGAAAA | |
| | CGAACGAAACCTACGGTAAGCTGGAAGCGGTCCAGTACAAAACCC | |
| | AAGTGCTAGCAGATTGGCAGAAACGCGGTCGTTCTTGGTCCACCAA | |
| | CTATTACATTAAGGTTCGTGCCGGTGACAATAAGTATATGCACCTG | |
| | AAAGTGTTCAACGGCCCGAACCAGTCTGGTGTTGTTGTTCAGGTTG | |
| | CGGACCGTGTTCTGACCGGTTACCAGGTTGACAAGAACAAAGATG | |
| | ACGAGCTGACGGGTTTC | |
| FcRn-23 | ATGATCCCGCGTGGCCTGTCTGAAGCTAAACCAGCAACTCCGGAAA | 1126 |
| 9 | TTCAAGAGATCGTCGATAAGGTGAAACCGCAGCTGGAAGAGAAAA | |
| | CGAACGAAACCTACGGTAAGCTGGAAGCGGTCCAGTACAAAACCC | |
| | AAGTGCTAGCATACAACTGGGAACGTTTTCGTAAAGTTTCCACCAA | |
| | CTATTACATTAAGGTTCGTGCCGGTGACAATAAGTATATGCACCTG | |
| | AAAGTGTTCAACGGCCCGTACCATAACCATCAGCATACCATCCATG | |
| | CGGACCGTGTTCTGACCGGTTACCAGGTTGACAAGAACAAAGATG | |
| | ACGAGCTGACGGGTTTC | |
| FcRn-24 | ATGATCCCGCGTGGCCTGTCTGAAGCTAAACCAGCAACTCCGGAAA | 1127 |
| 0 | TTCAAGAGATCGTCGATAAGGTGAAACCGCAGCTGGAAGAGAAAA | |
| | CGAACGAAACCTACGGTAAGCTGGAAGCGGTCCAGTACAAAACCC | |
| | AAGTGCTAGCAGGTTGGTCTCGTAACGTTTGGTTTTGGTCCACCAA | |
| | CTATTACATTAAGGTTCGTGCCGGTGACAATAAGTATATGCACCTG | |
| | AAAGTGTTCAACGGCCCGAAACAGGAACTGGGTACCAAAACCACC | |
| | GCGGACCGTGTTCTGACCGGTTACCAGGTTGACAAGAACAAAGAT | |
| | GACGAGCTGACGGGTTTC | |
| FcRn-24 | ATGATCCCGCGTGGCCTGTCTGAAGCTAAACCAGCAACTCCGGAAA | 1128 |
| 1 | TTCAAGAGATCGTCGATAAGGTGAAACCGCAGCTGGAAGAGAAAA | |
| | CGAACGAAACCTACGGTAAGCTGGAAGCGGTCCAGTACAAAACCC | |
| | AAGTGCTAGCATCTCAGACCCAGCATCGTCGTCATCATTCCACCAA | |
| | CTATTACATTAAGGTTCGTGCCGGTGACAATAAGTATATGCACCTG | |
| | AAAGTGTTCAACGGCCCGCTTGTTCCACAGCATCATCAGCATCAGG | |
| | CGGACCGTGTTCTGACCGGTTACCAGGTTGACAAGAACAAAGATG | |
| | ACGAGCTGACGGGTTTC | |
| FcRn-24 | ATGATCCCGCGTGGCCTGTCTGAAGCTAAACCAGCAACTCCGGAAA | 1129 |
| 2 | TTCAAGAGATCGTCGATAAGGTGAAACCGCAGCTGGAAGAGAAAA | |
| | CGAACGAAACCTACGGTAAGCTGGAAGCGGTCCAGTACAAAACCC | |
| | AAGTGCTAGCACCAAACGTTAAACATAAACATCGTTGGTCCACCAA | |
| | CTATTACATTAAGGTTCGTGCCGGTGACAATAAGTATATGCACCTG | |
| | AAAGTGTTCAACGGCCCGTGGCATGATATCGCAGGTGGTCATTACG | |
| | CGGACCGTGTTCTGACCGGTTACCAGGTTGACAAGAACAAAGATG | |
| | ACGAGCTGACGGGTTTC | |
| FcRn-24 | ATGATCCCGCGTGGCCTGTCTGAAGCTAAACCGGCAACTCCGGAAA | 1130 |
| 3 | TTCAAGAGATCGTCGATAAGGTGAAACCGCAGCTGGAAGAGAAAA | |
| | CGAACGAAACCTACGGTAAGCTGGAAGCGGTCCAGTACAAAACCC | |
| | AAGTGCTAGCAAAACATCCAGCATTTCATCAGCATTCTTCCACCAA | |
| | CTATTACATTAAGGTTCGTGCCGGTGACAATAAGTATATGCACCTG | |
| | AAAGTGTTCAACGGCCCGCGTCATGATCTGCATTACCATTACCCAG | |
| | CGGACCGTGTTCTGACCGGTTACCAGGTTGACAAGAACAAAGATG | |
| | ACGAGCTGACGGGTTTC | |
| FcRn-24 | ATGATCCCGCGTGGCCTGTCTGAAGCTAAACCAGCAACTCCGGAAA | 1131 |
| 4 | TTCAAGAGATCGTCGATAAGGTGAAACCGCAGCTGGAAGAGAAAA | |
| | CGAACGAAACCTACGGTAAGCTGGAAGCGGTCCAGTACAAAACCC | |
| | AAGTGCTAGCACCACATCATCATACCGATTGGCGTACCTCCACCAA | |
| | CTATTACATTAAGGTTCGTGCCGGTGACAATAAGTATATGCACCTG | |
| | AAAGTGTTCAACGGCCCGTACTGGCATTGGAAAGTTCGTCGTTTTG | |
| | CGGACCGTGTTCTGACCGGTTACCAGGTTGACAAGAACAAAGATG | |
| | ACGAGCTGACGGGTTTC | |
| FcRn-24 | ATGATCCCGCGTGGCCTGTCTGAAGCTAAACCAGCAACTCCGGAAA | 1132 |
| 5 | TTCAAGAGATCGTCGATAAGGTGAAACCGCAGCTGGAAGAGAAAA | |
| | CGAACGAAACCTACGGTAAGCTGGAAGCGGTCCAGTACAAAACCC | |
| | AAGTGCTAGCACATACCCATAAAATCCTGCATTTTCATTCCACCAA | |
| | CTATTACATTAAGGTTCGTGCCGGTGACAATAAGTATATGCACCTG | |
| | AAAGTGTTCAACGGCCCGGATAAACAGCGTTACGAAGATAAACAG | |
| | GCGGACCGTGTTCTGACCGGTTACCAGGTTGACAAGAACAAAGAT | |
| | GACGAGCTGACGGGTTTC | |
| FcRn-24 | ATGATCCCGCGTGGCCTGTCTGAAGCTAAACCAGCAACTCCGGAAA | 1133 |
| 6 | TTCAAGAGATCGTCGATAAGGTGAAACCGCAGCTGGAAGAGAAAA | |
| | CGAACGAAACCTACGGTAAGCTGGAAGCGGTCCAGTACAAAACCC | |
| | AAGTGCTAGCACCAAACCATCATTTTTTTCTGCAGTTTTCCACCAAC | |
| | TATTACATTAAGGTTCGTGCCGGTGACAATAAGTATATGCACCTGA | |
| | AAGTGTTCAACGGCCCGCAGCATCATCATCCACATCGTCATCCAGC | |
| | GGACCGTGTTCTGACCGGTTACCAGGTTGACAAGAACAAAGATGA | |
| | CGAGCTGACGGGTTTC | |
| FcRn-24 | ATGATCCCGCGTGGCCTGTCTGAAGCTAAACCAGCAACTCCGGAAA | 1134 |
| 7 | TTCAAGAGATCGTCGATAAGGTGAAACCGCAGCTGGAAGAGAAAA | |
| | CGAACGAAACCTACGGTAAGCTGGAAGCGGTCCAGTACAAAACCC | |
| | AAGTGCTAGCACGTCGTTACATCGGTCATAACTACTCTTCCACCAA | |
| | CTATTACATTAAGGTTCGTGCCGGTGACAATAAGTATATGCACCTG | |
| | AAAGTGTTCAACGGCCCGTGGCATCATTTTCATAACTCTTACGATG | |
| | CGGACCGTGTTCTGACCGGTTACCAGGTTGACAAGAACAAAGATG | |
| | ACGAGCTGACGGGTTTC | |
| FcRn-24 | ATGATCCCGCGTGGCCTGTCTGAAGCTAAACCAGCAACTCCGGAAA | 1135 |
| 8 | TTCAAGAGATCGTCGATAAGGTGAAACCGCAGCTGGAAGAGAAAA | |
| | CGAACGAAACCTACGGTAAGCTGGAAGCGGTCCAGTACAAAACCC | |
| | AAGTGCTAGCAACCCATTACCATCATCAGTGGGATCCATCCACCAA | |
| | CTATTACATTAAGGTTCGTGCCGGTGACAATAAGTATATGCACCTG | |
| | AAAGTGTTCAACGGCCCGATCTGGTACTCTCATCGTCCACGTGCAG | |
| | CGGACCGTGTTCTGACCGGTTACCAGGTTGACAAGAACAAAGATG | |
| | ACGAGCTGACGGGTTTC | |
| FcRn-24 | ATGATCCCGCGTGGCCTGTCTGAAGCTAAACCAGCAACTCCGGAAA | 1136 |
| 9 | TTCAAGAGATCGTCGATAAGGTGAAACCGCAGCTGGAAGAGAAAA | |
| | CGAACGAAACCTACGGTAAGCTGGAAGCGGTCCAGTACAAAACCC | |
| | AAGTGCTAGCAGATAAAAAACATGGTCAGTACAAATCCACCAACT | |
| | ATTACATTAAGGTTCGTGCCGGTGACAATAAGTATATGCACCTGAA | |
| | AGTGTTCAACGGCCCGTGGGATGATCATACCCTGAAATGGTACGCG | |
| | GACCGTGTTCTGACCGGTTACCAGGTTGACAAGAACAAAGATGAC | |
| | GAGCTGACGGGTTTC | |
| FcRn-25 | ATGATCCCGCGTGGCCTGTCTGAAGCTAAACCAGCAACTCCGGAAA | 1137 |
| 0 | TTCAAGAGATCGTCGATAAGGTGAAACCGCAGCTGGAAGAGAAAA | |
| | CGAACGAAACCTACGGTAAGCTGGAAGCGGTCCAGTACAAAACCC | |
| | AAGTGCTAGCATACCATATCCAGGGTGTTTACTGGCGTTCCACCAA | |
| | CTATTACATTAAGGTTCGTGCCGGTGACAATAAGTATATGCACCTG | |
| | AAAGTGTTCAACGGCCCGATCGCATTTTGGGGTCCAAAACGTTTTG | |
| | CGGACCGTGTTCTGACCGGTTACCAGGTTGACAAGAACAAAGATG | |
| | ACGAGCTGACGGGTTTC | |
| FcRn-25 | ATGATCCCGCGTGGCCTGTCTGAAGCTAAACCAGCAACTCCGGAAA | 1138 |
| 1 | TTCAAGAGATCGTCGATAAGGTGAAACCGCAGCTGGAAGAGAAAA | |
| | CGAACGAAACCTACGGTAAGCTGGAAGCGGTCCAGTACAAAACCC | |
| | AAGTGCTAGCATCTCGTTTTAAACATCATGTTCGTAACTCCACCAA | |
| | CTATTACATTAAGGTTCGTGCCGGTGACAATAAGTATATGCACCTG | |
| | AAAGTGTTCAACGGCCCGTTTCCACATCGTAACAAATCTGATGGTG | |
| | CGGACCGTGTTCTGACCGGTTACCAGGTTGACAAGAACAAAGATG | |
| | ACGAGCTGACGGGTTTC | |
| FcRn-25 | ATGATCCCGCGTGGCCTGTCTGAAGCTAAACCAGCAACTCCGGAAA | 1139 |
| 2 | TTCAAGAGATCGTCGATAAGGTGAAACCGCAGCTGGAAGAGAAAA | |
| | CGAACGAAACCTACGGTAAGCTGGAAGCGGTCCAGTACAAAACCC | |
| | AAGTGCTAGCATGGCATCATCAGCATCATCTGCTGGCATCCACCAA | |
| | CTATTACATTAAGGTTCGTGCCGGTGACAATAAGTATATGCACCTG | |
| | AAAGTGTTCAACGGCCCGTTTAAACGTTCTCAGCAGTGGGAATGGG | |
| | CGGACCGTGTTCTGACCGGTTACCAGGTTGACAAGAACAAAGATG | |
| | ACGAGCTGACGGGTTTC | |
| FcRn-25 | ATGATCCCGCGTGGCCTGTCTGAAGCTAAACCAGCAACTCCGGAAA | 1140 |
| 3 | TTCAAGAGATCGTCGATAAGGTGAAACCGCAGCTGGAAGAGAAAA | |
| | CGAACGAAACCTACGGTAAGCTGGAAGCGGTCCAGTACAAAACCC | |
| | AAGTGCTAGCACATAACAAACATCCATCTCCACGTGTTTCCACCAA | |
| | CTATTACATTAAGGTTCGTGCCGGTGACAATAAGTATATGCACCTG | |
| | AAAGTGTTCAACGGCCCGAAACATCGTTACCAGCCAACCCATTGGG | |
| | CGGACCGTGTTCTGACCGGTTACCAGGTTGACAAGAACAAAGATG | |
| | ACGAGCTGACGGGTTTC | |
| FcRn-25 | ATGATCCCGCGTGGCCTGTCTGAAGCTAAACCAGCAACTCCGGAAA | 1141 |
| 4 | TTCAAGAGATCGTCGATAAGGTGAAACCGCAGCTGGAAGAGAAAA | |
| | CGAACGAAACCTACGGTAAGCTGGAAGCGGTCCAGTACAAAACCC | |
| | AAGTGCTAGCAACCTGGTTTCATCAGCATGAACAGCAGTCCACCAA | |
| | CTATTACATTAAGGTTCGTGCCGGTGACAATAAGTATATGCACCTG | |
| | AAAGTGTTCAACGGCCCGTACCATGATATCTGGGCATGGCATGTTG | |
| | CGGACCGTGTTCTGACCGGTTACCAGGTTGACAAGAACAAAGATG | |
| | ACGAGCTGACGGGTTTC | |
| FcRn-25 | ATGATCCCGCGTGGCCTGTCTGAAGCTAAACCAGCAACTCCGGAAA | 1142 |
| 5 | TTCAAGAGATCGTCGATAAGGTGAAACCGCAGCTGGAAGAGAAAA | |
| | CGAACGAAACCTACGGTAAGCTGGAAGCGGTCCAGTACAAAACCC | |
| | AAGTGCTAGCATGGAAAGAATGGCGTTACCATCATCAGTCCACCA | |
| | ACTATTACATTAAGGTTCGTGCCGGTGACAATAAGTATATGCACCT | |
| | GAAAGTGTTCAACGGCCCGGATTTTGTTAAACATCATCTGCATGAT | |
| | GCGGACCGTGTTCTGACCGGTTACCAGGTTGACAAGAACAAAGAT | |
| | GACGAGCTGACGGGTTTC | |
| FcRn-25 | ATGATCCCGCGTGGCCTGTCTGAAGCTAAACCAGCAACTCCGGAAA | 1143 |
| 6 | TTCAAGAGATCGTCGATAAGGTGAAACCGCAGCTGGAAGAGAAAA | |
| | CGAACGAAACCTACGGTAAGCTGGAAGCGGTCCAGTACAAAACCC | |
| | AAGTGCTAGCATTTACCAAACATTGGGATCGTTGGTACTCCACCAA | |
| | CTATTACATTAAGGTTCGTGCCGGTGACAATAAGTATATGCACCTG | |
| | AAAGTGTTCAACGGCCCGATCTCTGATCATGTTCACTTTGGTTGGG | |
| | CGGACCGTGTTCTGACCGGTTACCAGGTTGACAAGAACAAAGATG | |
| | ACGAGCTGACGGGTTTC | |
| FcRn-25 | ATGATCCCGCGTGGCCTGTCTGAAGCTAAACCAGCAACTCCGGAAA | 1144 |
| 7 | TTCAAGAGATCGTCGATAAGGTGAAACCGCAGCTGGAAGAGAAAA | |
| | CGAACGAAACCTACGGTAAGCTGGAAGCGGTCCAGTACAAAACCC | |
| | AAGTGCTAGCAACCCGTCTGTACGATCATTCTGTTTGGTCCACCAA | |
| | CTATTACATTAAGGTTCGTGCCGGTGACAATAAGTATATGCACCTG | |
| | AAAGTGTTCAACGGCCCGTACCATCATCGTGATCATTGGGGTTGGG | |
| | CGGACCGTGTTCTGACCGGTTACCAGGTTGACAAGAACAAAGATG | |
| | ACGAGCTGACGGGTTTC | |
| FcRn-25 | ATGATCCCGCGTGGCCTGTCTGAAGCTAAACCAGCAACTCCGGAAA | 1145 |
| 8 | TTCAAGAGATCGTCGATAAGGTGAAACCGCAGCTGGAAGAGAAAA | |
| | CGAACGAAACCTACGGTAAGCTGGAAGCGGTCCAGTACAAAACCC | |
| | AAGTGCTAGCATGGGAATACCAGACCCATCATCCAGCATCCACCA | |
| | ACTATTACATTAAGGTTCGTGCCGGTGACAATAAGTATATGCACCT | |
| | GAAAGTGTTCAACGGCCCGGAATGGTTTACCGTTGGTGGTATCGCA | |
| | GCGGACCGTGTTCTGACCGGTTACCAGGTTGACAAGAACAAAGAT | |
| | GACGAGCTGACGGGTTTC | |
| FcRn-25 | ATGATCCCGCGTGGCCTGTCTGAAGCTAAACCAGCAACTCCGGAAA | 1146 |
| 9 | TTCAAGAGATCGTCGATAAGGTGAAACCGCAGCTGGAAGAGAAAA | |
| | CGAACGAAACCTACGGTAAGCTGGAAGCGGTCCAGTACAAAACCC | |
| | AAGTGCTAGCAGTTCATTTTCGTTCTCATCGTGATTTTTCCACCAAC | |
| | TATTACATTAAGGTTCGTGCCGGTGACAATAAGTATATGCACCTGA | |
| | AAGTGTTCAACGGCCCGGAACGTAAACATGCACATCAGCATCCAG | |
| | CGGACCGTGTTCTGACCGGTTACCAGGTTGACAAGAACAAAGATG | |
| | ACGAGCTGACGGGTTTC | |
| FcRn-26 | ATGATCCCGCGTGGCCTGTCTGAAGCTAAACCAGCAACTCCGGAAA | 1147 |
| 0 | TTCAAGAGATCGTCGATAAGGTGAAACCGCAGCTGGAAGAGAAAA | |
| | CGAACGAAACCTACGGTAAGCTGGAAGCGGTCCAGTACAAAACCC | |
| | AAGTGCTAGCATCTCGTCATACCCATCATCATCGTTCTTCCACCAAC | |
| | TATTACATTAAGGTTCGTGCCGGTGACAATAAGTATATGCACCTGA | |
| | AAGTGTTCAACGGCCCGGATTCTAACCTGTACAACGAATGGAACGC | |
| | GGACCGTGTTCTGACCGGTTACCAGGTTGACAAGAACAAAGATGA | |
| | CGAGCTGACGGGTTTC | |
| FcRn-26 | ATGATCCCGCGTGGCCTGTCTGAAGCTAAACCAGCAACTCCGGAAA | 1148 |
| 1 | TTCAAGAGATCGTCGATAAGGTGAAACCGCAGCTGGAAGAGAAAA | |
| | CGAACGAAACCTACGGTAAGCTGGAAGCGGTCCAGTACAAAACCC | |
| | AAGTGCTAGCAACCGCACGTTACGAACATGCACCAACCTCCACCA | |
| | ACTATTACATTAAGGTTCGTGCCGGTGACAATAAGTATATGCACCT | |
| | GAAAGTGTTCAACGGCCCGACCGCAAAACATTCTCATAAAAAACA | |
| | TGCGGACCGTGTTCTGACCGGTTACCAGGTTGACAAGAACAAAGAT | |
| | GACGAGCTGACGGGTTTC | |
| FcRn-26 | ATGATCCCGCGTGGCCTGTCTGAAGCTAAACCAGCAACTCCGGAAA | 1149 |
| 2 | TTCAAGAGATCGTCGATAAGGTGAAACCGCAGCTGGAAGAGAAAA | |
| | CGAACGAAACCTACGGTAAGCTGGAAGCGGTCCAGTACAAAACCC | |
| | AAGTGCTAGCACGTCATCGTAAAGAATCTTGGTACGTTTCCACCAA | |
| | CTATTACATTAAGGTTCGTGCCGGTGACAATAAGTATATGCACCTG | |
| | AAAGTGTTCAACGGCCCGAACTGGCCACATGGTATCGATCCAAAA | |
| | GCGGACCGTGTTCTGACCGGTTACCAGGTTGACAAGAACAAAGAT | |
| | GACGAGCTGACGGGTTTC | |
| FcRn-26 | ATGATCCCGCGTGGCCTGTCTGAAGCTAAACCAGCAACTCCGGAAA | 1150 |
| 3 | TTCAAGAGATCGTCGATAAGGTGAAACCGCAGCTGGAAGAGAAAA | |
| | CGAACGAAACCTACGGTAAGCTGGAAGCGGTCCAGTACAAAACCC | |
| | AAGTGCTAGCAGATCATGGTTACGCACGTGGTCATCATTCCACCAA | |
| | CTATTACATTAAGGTTCGTGCCGGTGACAATAAGTATATGCACCTG | |
| | AAAGTGTTCAACGGCCCGAAACATATCCATGAACATAAATCTGAA | |
| | GCGGACCGTGTTCTGACCGGTTACCAGGTTGACAAGAACAAAGAT | |
| | GACGAGCTGACGGGTTTC | |
| FcRn-26 | ATGATCCCGCGTGGCCTGTCTGAAGCTAAACCAGCAACTCCGGAAA | 1151 |
| 4 | TTCAAGAGATCGTCGATAAGGTGAAACCGCAGCTGGAAGAGAAAA | |
| | CGAACGAAACCTACGGTAAGCTGGAAGCGGTCCAGTACAAAACCC | |
| | AAGTGCTAGCAACCCCACATAAAATCTGGCATTGGCATTCCACCAA | |
| | CTATTACATTAAGGTTCGTGCCGGTGACAATAAGTATATGCACCTG | |
| | AAAGTGTTCAACGGCCCGACCAAAAAATTTCATCAGCATGAACGT | |
| | GCGGACCGTGTTCTGACCGGTTACCAGGTTGACAAGAACAAAGAT | |
| | GACGAGCTGACGGGTTTC | |
| FcRn-26 | ATGATCCCGCGTGGCCTGTCTGAAGCTAAACCAGCAACTCCGGAAA | 1152 |
| 5 | TTCAAGAGATCGTCGATAAGGTGAAACCGCAGCTGGAAGAGAAAA | |
| | CGAACGAAACCTACGGTAAGCTGGAAGCGGTCCAGTACAAAACCC | |
| | AAGTGCTAGCATCTTACGCACAGCATACCCGTCTGCATTCCACCAA | |
| | CTATTACATTAAGGTTCGTGCCGGTGACAATAAGTATATGCACCTG | |
| | AAAGTGTTCAACGGCCCGACCCGTCATCATCAGCATTACTACCTGG | |
| | CGGACCGTGTTCTGACCGGTTACCAGGTTGACAAGAACAAAGATG | |
| | ACGAGCTGACGGGTTTC | |
| FcRn-26 | ATGATCCCGCGTGGCCTGTCTGAAGCTAAACCAGCAACTCCGGAAA | 1153 |
| 6 | TTCAAGAGATCGTCGATAAGGTGAAACCGCAGCTGGAAGAGAAAA | |
| | CGAACGAAACCTACGGTAAGCTGGAAGCGGTCCAGTACAAAACCC | |
| | AAGTGCTAGCAATCGATCATCGTTACCATTACCTGCATTCCACCAA | |
| | CTATTACATTAAGGTTCGTGCCGGTGACAATAAGTATATGCACCTG | |
| | AAAGTGTTCAACGGCCCGTGGTACTGGACCCAGCATCATCGTTGGG | |
| | CGGACCGTGTTCTGACCGGTTACCAGGTTGACAAGAACAAAGATG | |
| | ACGAGCTGACGGGTTTC | |
| FcRn-26 | ATGATCCCGCGTGGCCTGTCTGAAGCTAAACCAGCAACTCCGGAAA | 1154 |
| 7 | TTCAAGAGATCGTCGATAAGGTGAAACCGCAGCTGGAAGAGAAAA | |
| | CGAACGAAACCTACGGTAAGCTGGAAGCGGTCCAGTACAAAACCC | |
| | AAGTGCTAGCACATGGTTACAACCATCGTAAAGTTCAGTCCACCAA | |
| | CTATTACATTAAGGTTCGTGCCGGTGACAATAAGTATATGCACCTG | |
| | AAAGTGTTCAACGGCCCGTACCATGTTTGGAACTGGCGTCTGAAAG | |
| | CGGACCGTGTTCTGACCGGTTACCAGGTTGACAAGAACAAAGATG | |
| | ACGAGCTGACGGGTTTC | |
| FcRn-26 | ATGATCCCGCGTGGCCTGTCTGAAGCTAAACCAGCAACTCCGGAAA | 1155 |
| 8 | TTCAAGAGATCGTCGATAAGGTGAAACCGCAGCTGGAAGAGAAAA | |
| | CGAACGAAACCTACGGTAAGCTGGAAGCGGTCCAGTACAAAACCC | |
| | AAGTGCTAGCAGGTCATCTGAAAGCAGCACCATGGCATTCCACCA | |
| | ACTATTACATTAAGGTTCGTGCCGGTGACAATAAGTATATGCACCT | |
| | GAAAGTGTTCAACGGCCCGTTTCATCATTTTCGTCCACATCATCATG | |
| | CGGACCGTGTTCTGACCGGTTACCAGGTTGACAAGAACAAAGATG | |
| | ACGAGCTGACGGGTTTC | |
| FcRn-26 | ATGATCCCGCGTGGCCTGTCTGAAGCTAAACCAGCAACTCCGGAAA | 1156 |
| 9 | TTCAAGAGATCGTCGATAAGGTGAAACCGCAGCTGGAAGAGAAAA | |
| | CGAACGAAACCTACGGTAAGCTGGAAGCGGTCCAGTACAAAACCC | |
| | AAGTGCTAGCAAAAGAAAAATACGCATCTTGGGAACGTTCCACCA | |
| | ACTATTACATTAAGGTTCGTGCCGGTGACAATAAGTATATGCACCT | |
| | GAAAGTGTTCAACGGCCCGTTTCTGAACGGTAAAAAACGTCATGTT | |
| | GCGGACCGTGTTCTGACCGGTTACCAGGTTGACAAGAACAAAGAT | |
| | GACGAGCTGACGGGTTTC | |
| FcRn-27 | ATGATCCCGCGTGGCCTGTCTGAAGCTAAACCAGCAACTCCGGAAA | 1157 |
| 0 | TTCAAGAGATCGTCGATAAGGTGAAACCGCAGCTGGAAGAGAAAA | |
| | CGAACGAAACCTACGGTAAGCTGGAAGCGGTCCAGTACAAAACCC | |
| | AAGTGCTAGCAAAAGGTCATCCACATGCACATCCACATTCCACCAA | |
| | CTATTACATTAAGGTTCGTGCCGGTGACAATAAGTATATGCACCTG | |
| | AAAGTGTTCAACGGCCCGTGGTGGAAAATCCATGGTTCTACCGTTG | |
| | CGGACCGTGTTCTGACCGGTTACCAGGTTGACAAGAACAAAGATG | |
| | ACGAGCTGACGGGTTTC | |
| FcRn-27 | ATGATCCCGCGTGGCCTGTCTGAAGCTAAACCAGCAACTCCGGAAA | 1158 |
| 1 | TTCAAGAGATCGTCGATAAGGTGAAACCGCAGCTGGAAGAGAAAA | |
| | CGAACGAAACCTACGGTAAGCTGGAAGCGGTCCAGTACAAAACCC | |
| | AAGTGCTAGCACCATACCGTCGTCATGAACATCATCAGTCCACCAA | |
| | CTATTACATTAAGGTTCGTGCCGGTGACAATAAGTATATGCACCTG | |
| | AAAGTGTTCAACGGCCCGAACTCTGATTTTCATCATAACCAGCAGG | |
| | CGGACCGTGTTCTGACCGGTTACCAGGTTGACAAGAACAAAGATG | |
| | ACGAGCTGACGGGTTTC | |
| FcRn-27 | ATGATCCCGCGTGGCCTGTCTGAAGCTAAACCAGCAACTCCGGAAA | 1159 |
| 2 | TTCAAGAGATCGTCGATAAGGTGAAACCGCAGCTGGAAGAGAAAA | |
| | CGAACGAAACCTACGGTAAGCTGGAAGCGGTCCAGTACAAAACCC | |
| | AAGTGCTAGCAGGTTTTCCACATTGGTTTGTTCATAACTCCACCAA | |
| | CTATTACATTAAGGTTCGTGCCGGTGACAATAAGTATATGCACCTG | |
| | AAAGTGTTCAACGGCCCGACCCATCATCTGCGTTACCATCATCAGG | |
| | CGGACCGTGTTCTGACCGGTTACCAGGTTGACAAGAACAAAGATG | |
| | ACGAGCTGACGGGTTTC | |
| FcRn-27 | ATGATCCCGCGTGGCCTGTCTGAAGCTAAACCAGCAACTCCGGAAA | 1160 |
| 3 | TTCAAGAGATCGTCGATAAGGTGAAACCGCAGCTGGAAGAGAAAA | |
| | CGAACGAAACCTACGGTAAGCTGGAAGCGGTCCAGTACAAAACCC | |
| | AAGTGCTAGCATTTCGTCGTTACCAGTCTTTTCATTACTCCACCAAC | |
| | TATTACATTAAGGTTCGTGCCGGTGACAATAAGTATATGCACCTGA | |
| | AAGTGTTCAACGGCCCGTTTTACAAATACCATCAGGTTCGTTGGGC | |
| | GGACCGTGTTCTGACCGGTTACCAGGTTGACAAGAACAAAGATGA | |
| | CGAGCTGACGGGTTTC | |
| FcRn-27 | ATGATCCCGCGTGGCCTGTCTGAAGCTAAACCAGCAACTCCGGAAA | 1161 |
| 4 | TTCAAGAGATCGTCGATAAGGTGAAACCGCAGCTGGAAGAGAAAA | |
| | CGAACGAAACCTACGGTAAGCTGGAAGCGGTCCAGTACAAAACCC | |
| | AAGTGCTAGCACCACGTTACCGTCATCATGTTGATTACTCCACCAA | |
| | CTATTACATTAAGGTTCGTGCCGGTGACAATAAGTATATGCACCTG | |
| | AAAGTGTTCAACGGCCCGTACTCTTTTCGTGATCATCATTGGTGGG | |
| | CGGACCGTGTTCTGACCGGTTACCAGGTTGACAAGAACAAAGATG | |
| | ACGAGCTGACGGGTTTC | |
| FcRn-27 | ATGATCCCGCGTGGCCTGTCTGAAGCTAAACCAGCAACTCCGGAAA | 1162 |
| 5 | TTCAAGAGATCGTCGATAAGGTGAAACCGCAGCTGGAAGAGAAAA | |
| | CGAACGAAACCTACGGTAAGCTGGAAGCGGTCCAGTACAAAACCC | |
| | AAGTGCTAGCAGATTACCTGAAACGTAACTTTCGTTACTCCACCAA | |
| | CTATTACATTAAGGTTCGTGCCGGTGACAATAAGTATATGCACCTG | |
| | AAAGTGTTCAACGGCCCGCCATTTTACCGTAACCATCATCATGAAG | |
| | CGGACCGTGTTCTGACCGGTTACCAGGTTGACAAGAACAAAGATG | |
| | ACGAGCTGACGGGTTTC | |
| FcRn-27 | ATGATCCCGCGTGGCCTGTCTGAAGCTAAACCAGCAACTCCGGAAA | 1163 |
| 6 | TTCAAGAGATCGTCGATAAGGTGAAACCGCAGCTGGAAGAGAAAA | |
| | CGAACGAAACCTACGGTAAGCTGGAAGCGGTCCAGTACAAAACCC | |
| | AAGTGCTAGCACGTTCTCATCCAGGTAAACATGTTCATTCCACCAA | |
| | CTATTACATTAAGGTTCGTGCCGGTGACAATAAGTATATGCACCTG | |
| | AAAGTGTTCAACGGCCCGTTTCAGCTGAACCTGCGTTGGGGTCAGG | |
| | CGGACCGTGTTCTGACCGGTTACCAGGTTGACAAGAACAAAGATG | |
| | ACGAGCTGACGGGTTTC | |
| FcRn-27 | ATGATCCCGCGTGGCCTGTCTGAAGCTAAACCAGCAACTCCGGAAA | 1164 |
| 7 | TTCAAGAGATCGTCGATAAGGTGAAACCGCAGCTGGAAGAGAAAA | |
| | CGAACGAAACCTACGGTAAGCTGGAAGCGGTCCAGTACAAAACCC | |
| | AAGTGCTAGCACATCATCATCGTTGGGCAAAATGGCTGTCCACCAA | |
| | CTATTACATTAAGGTTCGTGCCGGTGACAATAAGTATATGCACCTG | |
| | AAAGTGTTCAACGGCCCGGTTCATAACTTTCATGATATCCGTCATG | |
| | CGGACCGTGTTCTGACCGGTTACCAGGTTGACAAGAACAAAGATG | |
| | ACGAGCTGACGGGTTTC | |
| FcRn-27 | ATGATCCCGCGTGGCCTGTCTGAAGCTAAACCAGCAACTCCGGAAA | 1165 |
| 8 | TTCAAGAGATCGTCGATAAGGTGAAACCGCAGCTGGAAGAGAAAA | |
| | CGAACGAAACCTACGGTAAGCTGGAAGCGGTCCAGTACAAAACCC | |
| | AAGTGCTAGCAGCAGCACATCATAACCATTGGCATATCTCCACCAA | |
| | CTATTACATTAAGGTTCGTGCCGGTGACAATAAGTATATGCACCTG | |
| | AAAGTGTTCAACGGCCCGGCACAGCATGGTCATGTTCCATTTTCTG | |
| | CGGACCGTGTTCTGACCGGTTACCAGGTTGACAAGAACAAAGATG | |
| | ACGAGCTGACGGGTTTC | |
| FcRn-27 | ATGATCCCGCGTGGCCTGTCTGAAGCTAAACCAGCAACTCCGGAAA | 1166 |
| 9 | TTCAAGAGATCGTCGATAAGGTGAAACCGCAGCTGGAAGAGAAAA | |
| | CGAACGAAACCTACGGTAAGCTGGAAGCGGTCCAGTACAAAACCC | |
| | AAGTGCTAGCACCAGTTCAGAAACATGCAGGTTCTCATTCCACCAA | |
| | CTATTACATTAAGGTTCGTGCCGGTGACAATAAGTATATGCACCTG | |
| | AAAGTGTTCAACGGCCCGCCATGGCATAACGCAGAAATCAAACAT | |
| | GCGGACCGTGTTCTGACCGGTTACCAGGTTGACAAGAACAAAGAT | |
| | GACGAGCTGACGGGTTTC | |
| FcRn-28 | ATGATCCCGCGTGGCCTGTCTGAAGCTAAACCAGCAACTCCGGAAA | 1167 |
| 0 | TTCAAGAGATCGTCGATAAGGTGAAACCGCAGCTGGAAGAGAAAA | |
| | CGAACGAAACCTACGGTAAGCTGGAAGCGGTCCAGTACAAAACCC | |
| | AAGTGCTAGCAGATAACTGGCGTCATTGGCGTATCTGGTCCACCAA | |
| | CTATTACATTAAGGTTCGTGCCGGTGACAATAAGTATATGCACCTG | |
| | AAAGTGTTCAACGGCCCGGCAGGTTGGTCTTCTAACAAAGCAGATG | |
| | CGGACCGTGTTCTGACCGGTTACCAGGTTGACAAGAACAAAGATG | |
| | ACGAGCTGACGGGTTTC | |
| FcRn-28 | ATGATCCCGCGTGGCCTGTCTGAAGCTAAACCAGCAACTCCGGAAA | 1168 |
| 1 | TTCAAGAGATCGTCGATAAGGTGAAACCGCAGCTGGAAGAGAAAA | |
| | CGAACGAAACCTACGGTAAGCTGGAAGCGGTCCAGTACAAAACCC | |
| | AAGTGCTAGCACCACGTCATCATCATTGGGCATTTTCCACCAACTA | |
| | TTACATTAAGGTTCGTGCCGGTGACAATAAGTATATGCACCTGAAA | |
| | GTGTTCAACGGCCCGAAACGTCAGCATCATGATGTTGGTCAGGCGG | |
| | ACCGTGTTCTGACCGGTTACCAGGTTGACAAGAACAAAGATGACG | |
| | AGCTGACGGGTTTC | |
| FcRn-28 | ATGATCCCGCGTGGCCTGTCTGAAGCTAAACCAGCAACTCCGGAAA | 1169 |
| 2 | TTCAAGAGATCGTCGATAAGGTGAAACCGCAGCTGGAAGAGAAAA | |
| | CGAACGAAACCTACGGTAAGCTGGAAGCGGTCCAGTACAAAACCC | |
| | AAGTGCTAGCAGTTTCTTACGATGATATCACCTGGGTTTCCACCAA | |
| | CTATTACATTAAGGTTCGTGCCGGTGACAATAAGTATATGCACCTG | |
| | AAAGTGTTCAACGGCCCGAACTCTTCTTACGGTTGGCTGTGGTGGG | |
| | CGGACCGTGTTCTGACCGGTTACCAGGTTGACAAGAACAAAGATG | |
| | ACGAGCTGACGGGTTTC | |
| FcRn-28 | ATGATCCCGCGTGGCCTGTCTGAAGCTAAACCAGCAACTCCGGAAA | 1170 |
| 3 | TTCAAGAGATCGTCGATAAGGTGAAACCGCAGCTGGAAGAGAAAA | |
| | CGAACGAAACCTACGGTAAGCTGGAAGCGGTCCAGTACAAAACCC | |
| | AAGTGCTAGCACCACCTCATCCACGTGTTCAGCATTACTCCACCAA | |
| | CTATTACATTAAGGTTCGTGCCGGTGACAATAAGTATATGCACCTG | |
| | AAAGTGTTCAACGGCCCGGCATTTCGTGATCATCGTGCACCACATG | |
| | CGGACCGTGTTCTGACCGGTTACCAGGTTGACAAGAACAAAGATG | |
| | ACGAGCTGACGGGTTTC | |
| FcRn-28 | ATGATCCCGCGTGGCCTGTCTGAAGCTAAACCAGCAACTCCGGAAA | 1171 |
| 4 | TTCAAGAGATCGTCGATAAGGTGAAACCGCAGCTGGAAGAGAAAA | |
| | CGAACGAAACCTACGGTAAGCTGGAAGCGGTCCAGTACAAAACCC | |
| | AAGTGCTAGCAAAACAGTTTCGTCATCATCAGCATGAATCCACCAA | |
| | CTATTACATTAAGGTTCGTGCCGGTGACAATAAGTATATGCACCTG | |
| | AAAGTGTTCAACGGCCCGAAATGGTGGTCTACCCAGGGTATCGTTG | |
| | CGGACCGTGTTCTGACCGGTTACCAGGTTGACAAGAACAAAGATG | |
| | ACGAGCTGACGGGTTTC | |
| FcRn-28 | ATGATCCCGCGTGGCCTGTCTGAAGCTAAACCAGCAACTCCGGAAA | 1172 |
| 5 | TTCAAGAGATCGTCGATAAGGTGAAACCGCAGCTGGAAGAGAAAA | |
| | CGAACGAAACCTACGGTAAGCTGGAAGCGGTCCAGTACAAAACCC | |
| | AAGTGCTAGCAGAACATCATGAATACCATTACCGTTACTCCACCAA | |
| | CTATTACATTAAGGTTCGTGCCGGTGACAATAAGTATATGCACCTG | |
| | AAAGTGTTCAACGGCCCGTTTCGTCCAGTTCATCATATCCGTATCG | |
| | CGGACCGTGTTCTGACCGGTTACCAGGTTGACAAGAACAAAGATG | |
| | ACGAGCTGACGGGTTTC | |
| FcRn-28 | ATGATCCCGCGTGGCCTGTCTGAAGCTAAACCAGCAACTCCGGAAA | 1173 |
| 6 | TTCAAGAGATCGTCGATAAGGTGAAACCGCAGCTGGAAGAGAAAA | |
| | CGAACGAAACCTACGGTAAGCTGGAAGCGGTCCAGTACAAAACCC | |
| | AAGTGCTAGCACATCATCATCATCGTCAGCATCCATCCACCAACTA | |
| | TTACATTAAGGTTCGTGCCGGTGACAATAAGTATATGCACCTGAAA | |
| | GTGTTCAACGGCCCGAAAGTTGGTCAGGGTGTTAACCTGGGTGCGG | |
| | ACCGTGTTCTGACCGGTTACCAGGTTGACAAGAACAAAGATGACG | |
| | AGCTGACGGGTTTC | |
| FcRn-28 | ATGATCCCGCGTGGCCTGTCTGAAGCTAAACCAGCAACTCCGGAAA | 1174 |
| 7 | TTCAAGAGATCGTCGATAAGGTGAAACCGCAGCTGGAAGAGAAAA | |
| | CGAACGAAACCTACGGTAAGCTGGAAGCGGTCCAGTACAAAACCC | |
| | AAGTGCTAGCAAAACTGCATCAGGCACATCATTGGCATTCCACCAA | |
| | CTATTACATTAAGGTTCGTGCCGGTGACAATAAGTATATGCACCTG | |
| | AAAGTTTTCAACGGCCCGGAATGGTCTAACAAACATTACCAGTGGG | |
| | CGGACCGTGTTCTGACCGGTTACCAGGTTGACAAGAACAAAGATG | |
| | ACGAGCTGACGGGTTTC | |
| FcRn-28 | ATGATCCCGCGTGGCCTGTCTGAAGCTAAACCAGCAACTCCGGAAA | 1175 |
| 8 | TTCAAGAGATCGTCGATAAGGTGAAACCGCAGCTGGAAGAGAAAA | |
| | CGAACGAAACCTACGGTAAGCTGGAAGCGGTCCAGTACAAAACCC | |
| | AAGTGCTAGCAGAATACCATCATTACGGTACCTCTCGTTCCACCAA | |
| | CTATTACATTAAGGTTCGTGCCGGTGACAATAAGTATATGCACCTG | |
| | AAAGTGTTCAACGGCCCGCGTCAGCTGAAACATCATACCAACTTTG | |
| | CGGACCGTGTTCTGACCGGTTACCAGGTTGACAAGAACAAAGATG | |
| | ACGAGCTGACGGGTTTC | |
| FcRn-28 | ATGATCCCGCGTGGCCTGTCTGAAGCTAAACCAGCAACTCCGGAAA | 1176 |
| 9 | TTCAAGAGATCGTCGATAAGGTGAAACCGCAGCTGGAAGAGAAAA | |
| | CGAACGAAACCTACGGTAAGCTGGAAGCGGTCCAGTACAAAACCC | |
| | AAGTGCTAGCAGATAACAAACATATCCCACAGCGTCAGTCCACCA | |
| | ACTATTACATTAAGGTTCGTGCCGGTGACAATAAGTATATGCACCT | |
| | GAAAGTGTTCAACGGCCCGCGTAACCATGTTGCAGAAAAATACTG | |
| | GGCGGACCGTGTTCTGACCGGTTACCAGGTTGACAAGAACAAAGA | |
| | TGACGAGCTGACGGGTTTC | |
| FcRn-29 | ATGATCCCGCGTGGCCTGTCTGAAGCTAAACCAGCAACTCCGGAAA | 1177 |
| 0 | TTCAAGAGATCGTCGATAAGGTGAAACCGCAGCTGGAAGAGAAAA | |
| | CGAACGAAACCTACGGTAAGCTGGAAGCGGTCCAGTACAAAACCC | |
| | AAGTGCTAGCACATAAACAGTGGCAGTGGACCATCGTTTCCACCAA | |
| | CTATTACATTAAGGTTCGTGCCGGTGACAATAAGTATATGCACCTG | |
| | AAAGTGTTCAACGGCCCGGCATACAAATCTGATAAAATCCGTAAA | |
| | GCGGACCGTGTTCTGACCGGTTACCAGGTTGACAAGAACAAAGAT | |
| | GACGAGCTGACGGGTTTC | |
| FcRn-29 | ATGATCCCGCGTGGCCTGTCTGAAGCTAAACCAGCAACTCCGGAAA | 1178 |
| 1 | TTCAAGAGATCGTCGATAAGGTGAAACCGCAGCTGGAAGAGAAAA | |
| | CGAACGAAACCTACGGTAAGCTGGAAGCGGTCCAGTACAAAACCC | |
| | AAGTGCTAGCATACCGTATCGGTCATGGTGTTCAGCATTCCACCAA | |
| | CTATTACATTAAGGTTCGTGCCGGTGACAATAAGTATATGCACCTG | |
| | AAAGTGTTCAACGGCCCGTACGATAAACCATACATCGTTTGGATCG | |
| | CGGACCGTGTTCTGACCGGTTACCAGGTTGACAAGAACAAAGATG | |
| | ACGAGCTGACGGGTTTC | |
| FcRn-29 | ATGATCCCGCGTGGCCTGTCTGAAGCTAAACCAGCAACTCCGGAAA | 1179 |
| 2 | TTCAAGAGATCGTCGATAAGGTGAAACCGCAGCTGGAAGAGAAAA | |
| | CGAACGAAACCTACGGTAAGCTGGAAGCGGTCCAGTACAAAACCC | |
| | AAGTGCTAGCAGATCAGGTTCGTCGTATCCCACATCATTCCACCAA | |
| | CTATTACATTAAGGTTCGTGCCGGTGACAATAAGTATATGCACCTG | |
| | AAAGTGTTCAACGGCCCGCATGATAAACATCCACAGTCTTGGGCAG | |
| | CGGACCGTGTTCTGACCGGTTACCAGGTTGACAAGAACAAAGATG | |
| | ACGAGCTGACGGGTTTC | |
| FcRn-29 | ATGATCCCGCGTGGCCTGTCTGAAGCTAAACCAGCAACTCCGGAAA | 1180 |
| 3 | TTCAAGAGATCGTCGATAAGGTGAAACCGCAGCTGGAAGAGAAAA | |
| | CGAACGAAACCTACGGTAAGCTGGAAGCGGTCCAGTACAAAACCC | |
| | AAGTGCTAGCAGAAGGTAAACATGAATTTCGTTTTCAGTCCACCAA | |
| | CTATTACATTAAGGTTCGTGCCGGTGACAATAAGTATATGCACCTG | |
| | AAAGTGTTCAACGGCCCGTGGGATAAACATCGTCAGCATCTGTGGG | |
| | CGGACCGTGTTCTGACCGGTTACCAGGTTGACAAGAACAAAGATG | |
| | ACGAGCTGACGGGTTTC | |
| FcRn-29 | ATGATCCCGCGTGGCCTGTCTGAAGCTAAACCAGCAACTCCGGAAA | 1181 |
| 4 | TTCAAGAGATCGTCGATAAGGTGAAACCGCAGCTGGAAGAGAAAA | |
| | CGAACGAAACCTACGGTAAGCTGGAAGCGGTCCAGTACAAAACCC | |
| | AAGTGCTAGCACATTACTGGGGTCGTTGGTACAAAATCTCCACCAA | |
| | CTATTACATTAAGGTTCGTGCCGGTGACAATAAGTATATGCACCTG | |
| | AAAGTGTTCAACGGCCCGTTTCATGCATTTTGGCATCTGGCATACG | |
| | CGGACCGTGTTCTGACCGGTTACCAGGTTGACAAGAACAAAGATG | |
| | ACGAGCTGACGGGTTTC | |

[0086] Anti-human FcRn AFFIMER® polypeptides provided herein, in some embodiments, are linked to another molecule and extend the half-life of that molecule (e.g., a therapeutic polypeptide). The term half-life refers to the amount of time it takes for a substance, such as an therapeutic AFFIMER® polypeptide, to lose half of its pharmacologic or physiologic activity or concentration. Biological half-life can be affected by elimination, excretion, degradation (e.g., enzymatic degradation) of the substance, or absorption and concentration in certain organs or tissues of the body. Biological half-life can be assessed, for example, by determining the time it takes for the blood plasma concentration of the substance to reach half its steady state level (“plasma half-life”).

[0087] In some embodiments, an anti-human FcRn AFFIMER® polypeptide extends the serum half-life of a molecule (e.g., a therapeutic polypeptide) in vivo. For example, an anti-human FcRn AFFIMER® polypeptide may extend the half-life of a molecule by at least 1.2-fold, relative to the half-life of the molecule not linked to an anti-human FcRn AFFIMER® polypeptide. In some embodiments, an anti-human FcRn AFFIMER® polypeptide extends the half-life of a molecule by at least 1.5-fold, at least 2-fold, at least 3-fold, at least 4-fold, at least 5-fold, at least 6-fold, at least 7-fold, at least 8-fold, at least 9-fold, at least 10-fold, at least 20-fold, or at least 30-fold, relative to the half-life of the molecule not linked to an anti-human FcRn AFFIMER® polypeptide. In some embodiments, an anti-human FcRn AFFIMER® polypeptide extends the half-life of a molecule by 1.2-fold to 5-fold, 1.2-fold to 10-fold, 1.5-fold to 5-fold, 1.5-fold to 10-fold, 2-fold to 5-fold, 2-fold to 10-fold, 3-fold to 5-fold, 3-fold to 10-fold, 15-fold to 5-fold, 4-fold to 10-fold, or 5-fold to 10-fold, relative to the half-life of the molecule not linked to an anti-human FcRn AFFIMER® polypeptide. In some embodiments, an anti-human FcRn AFFIMER® polypeptide extends the half-life of a molecule by at least 6 hours, at least 12 hours, at least 24 hours, at least 48 hours, at least 72 hours, at least 96 hours, for example, at least 1 week after in vivo administration, relative to the half-life of the molecule not linked to an anti-human FcRn AFFIMER® polypeptide.

### Polypeptides

[0088] A polypeptide is a polymer of amino acids (naturally-occurring or non-naturally occurring, e.g., amino acid analogs) of any length. The terms “polypeptide” and “peptide” are used interchangeably herein unless noted otherwise. A protein is one example of a polypeptide. It should be understood that a polypeptide may be linear or branched, it may comprise naturally-occurring and/or non-naturally-occurring (e.g., modified) amino acids, and/or it may include non-amino acids (e.g., interspersed throughout the polymer). A polypeptide, as provided herein, may be modified (e.g., naturally or non-naturally), for example, via disulfide bond formation, glycosylation, lipidation, acetylation, phosphorylation, or conjugation with a labeling component. Polypeptides, in some instances, may contain at least one analog of an amino acid (including, for example, unnatural amino acids) and/or other modifications.

[0089] An amino acid (also referred to as an amino acid residue) participates in peptide bonds of a polypeptide. In general, the abbreviations used herein for designating the amino acids are based on recommendations of the IUPAC-IUB Commission on Biochemical Nomenclature (see Biochemistry (1972) 11:1726-1732). For instance, Met, Ile, Leu, Ala and Gly represent “residues” of methionine, isoleucine, leucine, alanine and glycine, respectively. A residue is a radical derived from the corresponding α amino acid by eliminating the OH portion of the carboxyl group and the H portion of the α amino group. An amino acid side chain is that part of an amino acid exclusive of the —CH(NH2)COOH portion, as defined by K. D. Kopple, “Peptides and Amino Acids” W. A. Benjamin Inc., New York and Amsterdam, 1966, pages 2 and 33.

[0090] Amino acids used herein, in some embodiments, are naturally-occurring amino acids found in proteins, for example, or the naturally-occurring anabolic or catabolic products of such amino acids that contain amino and carboxyl groups. Examples of amino acid side chains include side chains selected from those of the following amino acids: glycine, alanine, valine, cysteine, leucine, isoleucine, serine, threonine, methionine, glutamic acid, aspartic acid, glutamine, asparagine, lysine, arginine, proline, histidine, phenylalanine, tyrosine, and tryptophan, and those amino acids and amino acid analogs that have been identified as constituents of peptidylglycan bacterial cell walls.

[0091] Amino acids having basic sidechains include Arg, Lys and His Amino acids having acidic sidechains include Glu and Asp Amino acids having neutral polar sidechains include Ser, Thr, Asn, Gln, Cys and Tyr Amino acids having neutral non-polar sidechains include Gly, Ala, Val, Ile, Leu, Met, Pro, Trp and Phe Amino acids having non-polar aliphatic sidechains include Gly, Ala, Val, Ile and Leu Amino acids having hydrophobic sidechains include Ala, Val, Ile, Leu, Met, Phe, Tyr and Trp Amino acids having small hydrophobic sidechains include Ala and Val. Amino acids having aromatic sidechains include Tyr, Trp and Phe.

[0092] The term amino acid includes analogs, derivatives and congeners of any specific amino acid referred to herein; for instance, the AFFIMER® polypeptides (particularly if generated by chemical synthesis) can include an amino acid analog such as, for example, cyanoalanine, canavanine, djenkolic acid, norleucine, 3-phosphoserine, homoserine, dihydroxy-phenylalanine, 5-hydroxytryptophan, 1-methylhistidine, 3-methylhistidine, diaminiopimelic acid, ornithine, or diaminobutyric acid. Other naturally-occurring amino acid metabolites or precursors having side chains that are suitable herein will be recognized by those skilled in the art and are included in the scope of the present disclosure.

[0093] Also included herein are the (D) and (L) stereoisomers of such amino acids when the structure of the amino acid admits of stereoisomeric forms. The configuration of the amino acids and amino acids herein are designated by the appropriate symbols (D), (L) or (DL); furthermore, when the configuration is not designated the amino acid or residue can have the configuration (D), (L) or (DL). It will be noted that the structure of some of the compounds of the present disclosure includes asymmetric carbon atoms. It is to be understood accordingly that the isomers arising from such asymmetry are included within the scope of the present disclosure. Such isomers can be obtained in substantially pure form by classical separation techniques and by sterically controlled synthesis. For the purposes of this disclosure, unless expressly noted to the contrary, a named amino acid shall be construed to include both the (D) or (L) stereoisomers.

[0094] Percent identity, in the context of two or more nucleic acids or polypeptides, refers to two or more sequences or subsequences that are the same (identical/100% identity) or have a specified percentage (e.g., at least 70% identity) of nucleotides or amino acid residues that are the same, when compared and aligned (introducing gaps, if necessary) for maximum correspondence, not considering any conservative amino acid substitutions as part of the sequence identity. The percent identity may be measured using sequence comparison software or algorithms or by visual inspection. Various algorithms and software that may be used to obtain alignments of amino acid or nucleotide sequences are well-known in the art. These include, but are not limited to, BLAST, ALIGN, Megalign, BestFit, GCG Wisconsin Package, and variants thereof. In some embodiments, two nucleic acids or polypeptides of the present disclosure are substantially identical, meaning they have at least 70%, at least 75%, at least 80%, at least 85%, at least 90%, and in some embodiments at least 95%, 96%, 97%, 98%, 99% nucleotide or amino acid residue identity, when compared and aligned for maximum correspondence, as measured using a sequence comparison algorithm or by visual inspection. In some embodiments, identity exists over a region of the amino acid sequences that is at least about 10 residues, at least about 20 residues, at least about 40-60 residues, at least about 60-80 residues in length or any integral value there between. In some embodiments, identity exists over a longer region than 60-80 residues, such as at least about 80-100 residues, and in some embodiments the sequences are substantially identical over the full length of the sequences being compared, such as the coding region of a target protein or an antibody. In some embodiments, identity exists over a region of the nucleotide sequences that is at least about 10 bases, at least about 20 bases, at least about 40-60 bases, at least about 60-80 bases in length or any integral value there between. In some embodiments, identity exists over a longer region than 60-80 bases, such as at least about 80-1000 bases or more, and in some embodiments the sequences are substantially identical over the full length of the sequences being compared, such as a nucleotide sequence encoding a protein of interest.

[0095] A conservative amino acid substitution is one in which one amino acid residue is replaced with another amino acid residue having a similar side chain Families of amino acid residues having similar side chains have been generally defined in the art, including basic side chains (e.g., lysine, arginine, histidine), acidic side chains (e.g., aspartic acid, glutamic acid), uncharged polar side chains (e.g., glycine, asparagine, glutamine, serine, threonine, tyrosine, cysteine), nonpolar side chains (e.g., alanine, valine, leucine, isoleucine, proline, phenylalanine, methionine, tryptophan), beta-branched side chains (e.g., threonine, valine, isoleucine) and aromatic side chains (e.g., tyrosine, phenylalanine, tryptophan, histidine). For example, substitution of a phenylalanine for a tyrosine is a conservative substitution. Generally, conservative substitutions in the sequences of the polypeptides, soluble proteins, and/or antibodies of the present disclosure do not abrogate the binding of the polypeptide, soluble protein, or antibody containing the amino acid sequence, to the target binding site. Methods of identifying amino acid conservative substitutions that do not eliminate binding are well-known in the art.

[0096] Herein, it should be understood that an isolated molecule (e.g., polypeptide (e.g., soluble protein, antibody, etc.), polynucleotide (e.g., vector), cell, or other composition) is in a form not found in nature. Isolated molecules, for example, have been purified to a degree that is not possible in nature.

[0097] In some embodiments, an isolated molecule (e.g., polypeptide (e.g., soluble protein, antibody, etc.), polynucleotide (e.g., vector), cell, or other composition) is substantially pure, which refer to an isolated molecule that is at least 50% pure (e.g., free from 50% of contaminants associated with the unpurified form of the molecule), at least 90% pure, at least 95% pure, at least 98% pure, or at least 99% pure.

[0098] Conjugates, Including Polypeptide Fusions

[0099] The verb conjugate (used interchangeably with the verb link) herein refers to the joining together of two or more molecules (e.g., polypeptides and/or chemical moieties) to form another molecule. Thus, one molecule (e.g., an anti-FcRn AFFIMER® polypeptide) conjugated to another molecule (e.g., another AFFIMER® polypeptide, drug molecule, or other therapeutic protein or nucleic acid) forms a conjugate. The joining of two or more molecules can be, for example, through a non-covalent bond or a covalent bond. For example, an anti-FcRn AFFIMER® polypeptide linked directly or indirectly to an an FcRn affmier. For example, an anti-FcRn AFFIMER® polypeptide linked directly or indirectly to a chemical moiety or to another polypeptide (e.g., a heterologous polypeptide) forms a conjugate, as provided herein. Non-limiting examples of conjugates include chemical conjugates (e.g., joined through “click” chemistry or another chemical reaction) and fusions (two molecules linked by contiguous peptide bonds). In some embodiments, a conjugate is a fusion polypeptide, for example, a fusion protein. In some embodiments, an anti-FcRn AFFIMER® polypeptide is conjugated to two or more other molecules. For example, dual (or multi) mode of action drug conjugates may be conjugated to an anti-FcRn AFFIMER® polypeptide of the present disclosure. Such dual mode of action drug conjugates include those of the TMAC (Tumor Microenvironment-Activated Conjugates) platform (see, e.g., avacta.com/therapeutics/tmac-affimer-drug-conjugates).

[0100] A fusion polypeptide (e.g., fusion protein) is a polypeptide comprising at least two domains (e.g., protein domains) encoded by a polynucleotide comprising nucleotide sequences of at least two separate molecules (e.g., two genes). In some embodiments, a polypeptide comprises a heterologous polypeptide covalently linked (to an amino acid of the polypeptide) through an amide bond to form a contiguous fusion polypeptide (e.g., fusion protein). In some embodiments, the heterologous polypeptide comprises a therapeutic polypeptide. In some embodiments, an anti-FcRn AFFIMER® polypeptide is conjugated to a heterologous polypeptide through contiguous peptide bonds at the C-terminus or N-terminus of the anti-human FcRn AFFIMER® polypeptide.

[0101] A linker is a molecule inserted between a first polypeptide (e.g., as AFFIMER® polypeptide) and a second polypeptide (e.g., another AFFIMER® polypeptide, an Fc domain, a ligand binding domain, etc). A linker may be any molecule, for example, one or more nucleotides, amino acids, chemical functional groups. In some embodiments, the linker is a peptide linker (e.g., two or more amino acids). Linkers should not adversely affect the expression, secretion, or bioactivity of the polypeptides. In some embodiments, linkers are not antigenic and do not elicit an immune response. An immune response includes a response from the innate immune system and/or the adaptive immune system. Thus, an immune response may be a cell-mediate response and/or a humoral immune response. The immune response may be, for example, a T cell response, a B cell response, a natural killer (NK) cell response, a monocyte response, and/or a macrophage response. Other cell responses are contemplated herein.

[0102] In some embodiments, linkers are non-protein-coding.

[0103] In some embodiments, a conjugate comprises an AFFIMER® polypeptide linked to a therapeutic or diagnostic molecule. In some embodiments, a conjugate comprises an AFFIMER® polypeptide linked to another protein, a nucleic acid, a drug, or other small molecule or macromolecule.

[0104] Any conjugation method may be used, or readily adapted, for joining a molecule to an AFFIMER® polypeptide of the present disclosure, including, for example, the methods described by Hunter, et al., (1962) Nature 144:945; David, et al., (1974) Biochemistry 13:1014; Pain, et al., (1981) J. Immunol. Meth. 40:219; and Nygren, J., (1982) Histochem. and Cytochem. 30:407.

### Therapeutics

[0105] In some embodiments, an AFFIMER® polypeptide is linked to a therapeutic molecule. Herein, a therapeutic molecule may be used, for example, to prevent and/or treat a disease in a subject, such as a human subject or other animal subject.

[0106] In some embodiments, the therapeutic molecule is for the treatment of an autoimmune disease (a condition in which a subject's immune system mistaken attacks his/her body). Non-limiting examples of autoimmune diseases include myasthenia gravis, pemphigus vulgaris, neuromyelitis optica, Guillain-Barre syndrome, rheumatoid arthritis, systemic lupus erythematosus (lupus), idiopathic thrombocytopenic purpura, thrombotic thrombocytopenic purpura, antiphospholipid syndrome (APS), autoimmune urticarial, chronic inflammatory demyelinating polyneuropathy (CIDP), psoriasis, Goodpasture's syndrome, Graves' disease, inflammatory bowel disease, Crohn's disease, Sjorgren's syndrome, hemolytic anemia, neutropenia, paraneoplastic cerebellar degeneration, paraproteinemic polyneuropathies, primary biliary cirrhosis, stiff person syndrome, vitiligo, warm idiopathic haemolytic anaemia, multiple sclerosis, type 1 diabetes mellitus, Hashimoto's thyroiditis, Myasthenia gravis, autoimmune vasculitis, pernicus anemia, and celiac disease. Other autoimmune diseases are contemplated herein.

[0107] In some embodiments, the therapeutic molecule is for the treatment of a cancer. Non-limiting examples of cancers include skin cancer (e.g., melanoma or non-melanoma, such as basal cell or squamous cell), lung cancer, prostate cancer, breast cancer, colorectal cancer, kidney (renal) cancer, bladder cancer, non-Hodgkin's lymphoma, thyroid cancer, endometrial cancer, exocrine cancer, and pancreatic cancer. Other cancers are contemplated herein.

[0108] In some embodiments, the therapeutic molecule is for the treatment of an inflammatory disease or disorder (a disease, disorder or condition characterized by inflammation of body tissue or having an inflammatory component). These include local inflammatory responses and systemic inflammation. Non-limiting examples of inflammatory disorders include: transplant rejection, including skin graft rejection; chronic inflammatory disorders of the joints, including arthritis, rheumatoid arthritis, osteoarthritis and bone diseases associated with increased bone resorption; inflammatory bowel diseases such as ileitis, ulcerative colitis, Barrett's syndrome, and Crohn's disease; inflammatory lung disorders such as asthma, adult respiratory distress syndrome, and chronic obstructive airway disease; inflammatory disorders of the eye including corneal dystrophy, trachoma, onchocerciasis, uveitis, sympathetic ophthalmitis and endophthalmitis; chronic inflammatory disorders of the gums, including gingivitis and periodontitis; tuberculosis; leprosy; inflammatory diseases of the kidney including uremic complications, glomerulonephritis and nephrosis; inflammatory disorders of the skin including sclerodermatitis, psoriasis and eczema; inflammatory diseases of the central nervous system, including chronic demyelinating diseases of the nervous system, multiple sclerosis, AIDS-related neurodegeneration and Alzheimer's disease, infectious meningitis, encephalomyelitis, Parkinson's disease, Huntington's disease, amyotrophic lateral sclerosis and viral or autoimmune encephalitis; autoimmune disorders, immune-complex vasculitis, systemic lupus and erythematodes; systemic lupus erythematosus (SLE); and inflammatory diseases of the heart such as cardiomyopathy, ischemic heart disease hypercholesterolemia, atherosclerosis; as well as various other diseases with significant inflammatory components, including preeclampsia; chronic liver failure, brain and spinal cord trauma. There may also be a systemic inflammation of the body, exemplified by gram-positive or gram negative shock, hemorrhagic or anaphylactic shock, or shock induced by cancer chemotherapy in response to pro-inflammatory cytokines, e.g., shock associated with pro-inflammatory cytokines. Such shock can be induced, e.g., by a chemotherapeutic agent used in cancer chemotherapy.

[0109] In some embodiments, the therapeutic molecule is for the treatment of a cardiovascular disease or disorder. Cardiovascular disorders include, but are not limited to, abnormal heart rhythms, or arrhythmias, aorta disease and Marfan syndrome, congenital heart disease, coronary artery disease (e.g., narrowing of the arteries), deep vein thrombosis and pulmonary embolism, heart attack, heart failure, heart muscle disease (e.g., cardiomyopathy), heart valve disease, pericardial disease, peripheral vascular disease, rheumatic heart disease, stroke, and vascular disease (e.g., blood vessel disease).

[0110] In some embodiments, the therapeutic molecule is for the treatment of a metabolic disease or disorder. Examples of metabolic disorders include the following: glycogen storage diseases (also referred to as glycogenosis or dextrinosis), which include disorders that affect carbohydrate metabolism; fatty oxidation disorders, which affect fat metabolism and metabolism of fat components; and mitochondrial disorders, which affect mitochondria. Examples of glycogen storage diseases (GSD) include at least GSD type I (glucose-6-phosphatase deficiency; von Gierke's disease); GSD type II (acid maltase deficiency; Pompe's disease); GSD type III (glycogen debrancher deficiency; Cori's disease or Forbe's disease); GSD type IV (glycogen branching enzyme deficiency; Andersen disease); GSD type V (muscle glycogen phosphorylase deficiency; McArdle disease); GSD type VI (liver phosphorylase deficiency, Hers's disease); GSD type VII (muscle phosphofructokinase deficiency; Tarui's disease); GSD type IX (phosphorylase kinase deficiency); and GSD type XI (glucose transporter deficiency; Fanconi-Bickel disease). Examples of fatty acid metabolism deficiencies include at least coenzyme A dehydrogenase deficiencies; other coenzyme A enzyme deficiencies; carnitine-related disorders; or lipid storage disorders. Examples of coenzyme A dehydrogenase deficiencies include at least very long-chain acyl-coenzyme A dehydrogenase deficiency (VLCAD); long-chain 3-hydroxyacyl-coenzyme A dehydrogenase deficiency (LCHAD); medium-chain acyl-coenzyme A dehydrogenase deficiency (MCAD); short-chain acyl-coenzyme A dehydrogenase deficiency (SCAD); and short chain L-3-hydroxyacyl-coA dehydrogenase deficiency (SCHAD). Examples of other coenzyme A enzyme deficiencies include at least 2,4 Dienoyl-CoA reductase deficiency; 3-hydroxy-3-methylglutaryl-CoA lyase deficiency; and malonyl-CoA decarboxylase deficiency. Examples of carnitine-related deficiencies include at least primary carnitine deficiency; carnitine-acylcarnitine translocase deficiency; carnitine palmitoyltransferase I deficiency (CPT); and carnitine palmitoyltransferase II deficiency (CPT). Examples of lipid storage diseases include acid lipase diseases; Wolman disease; cholesteryl ester storage disease; Gaucher disease; Niemann-Pick disease; Fabry disease; Farber's disease; gangliosidoses; Krabbe disease; and metachromatic leukodystrophy. Other fatty acid metabolism disorders include at least mitochondrial trifunctional protein deficiency; electron transfer flavoprotein (ETF) dehydrogenase deficiency (GAII & MADD); Tangier disease; and acute fatty liver of pregnancy. Examples of mitochondrial diseases include at least progressive external ophthalmoplegia (PEO); Diabetes mellitus and deafness (DAD); Leber hereditary optic neuropathy (LHON) Mitochondrial encephalomyopathy, lactic acidosis, and stroke-like syndrome (MELAS); Myoclonic epilepsy and ragged-red fibers (MERRF); Leigh syndrome; subacute sclerosing encephalopathy; Neuropathy, ataxia, retinitis pigmentosa, and ptosis (NARP); Kearns-Sayre syndrome (KSS); Myoneurogenic gastrointestinal encephalopathy (MNGIE).

[0111] The term treat, as known in the art, refers to the process of alleviating at least one symptom associated with a disease. A symptom may be a physical, mental, or pathological manifestation of a disease. Symptoms associated with various diseases are known. To treat or prevent a particular condition, a conjugate as provided herein (e.g., an anti-human FcRn AFFIMER® polypeptide linked to a therapeutic molecule) should be administered in an effective amount, which can be any amount used to treat or prevent the condition. Thus, in some embodiments, an effective amount is an amount used to alleviate a symptom associated with the particular disease being treated. Methods are known for determining effective amounts of various therapeutic molecules, for example.

[0112] A subject may be any animal (e.g., a mammal), including, but not limited to, humans, non-human primates, canines, felines, and rodents. A “patient” refers to a human subject.

[0113] In some embodiments, an anti-human FcRn AFFIMER® polypeptide is linked to an agonist of a particular molecule (e.g., receptor) of interest. In other embodiments, an anti-human FcRn AFFIMER® polypeptide is linked to an antagonist of a particular molecule of interest. An agonist herein refers to a molecule that binds to and activates another molecule to produce a biological response. By contrast, an antagonist blocks the action of the agonist, and an inverse agonist causes an action opposite to that of the agonist. Thus, an antagonist herein refers to a molecule that binds to and deactivates or prevents activation of another molecule.

[0114] In some embodiments, an AFFIMER® polypeptide is considered “pharmaceutically acceptable”, and in some embodiments, is formulated with a pharmaceutically-acceptable excipient. A molecule or other substance/agent is considered pharmaceutically acceptable?if it is approved or approvable by a regulatory agency of the Federal government or a state government or listed in the U.S. Pharmacopeia or other generally recognized pharmacopeia for use in animals, including humans. An excipient may be any inert (inactive), non-toxic agent, administered in combination with an AFFIMER® polypeptide. Non-limiting examples of excipients include buffers (e.g., sterile saline), salts, carriers, preservatives, fillers, coloring agents.

[0115] Therapeutic molecules for use herein include, for example, those recognized in the official United States Pharmacopeia, official Homeopathic Pharmacopeia of the United States, official National Formulary, or any supplement thereof, and include, but are not limited, to small molecules chemicals/drugs, polynucleotides (e.g., RNA interference molecules, such as miRNA, siRNA, shRNA, and antisense RNA), and polypeptides (e.g., antibodies). Classes of therapeutic molecules that may be used as provided herein include, but are not limited to, recombinant proteins, antibodies, cytotoxic agents, anti-metabolites, alkylating agents, antibiotics, growth factors (e.g., erythropoietin, granulocyte colony-stimulating factor (G-CSF), granulocyte-macrophage colony-stimulating factor (GM-CSF), keratinocyte growth factor)), cytokines, chemokines, interferons (e.g., interferon-alpha, interferon-beta, interferon-gamma), blood factors (e.g., factor VIII, factor Vila, factor IX, thrombin, antithrombin), anti-mitotic agents, toxins, apoptotic agents, (e.g., DNA alkylating agents), topoisomerase inhibitors, endoplasmic reticulum stress inducing agents, platinum compounds, antimetabolites, vincalkaloids, taxanes, epothilones, enzyme inhibitors, receptor antagonists, tyrosine kinase inhibitors, radiosensitizers, chemotherapeutic combination therapies, receptor traps, receptor ligands, angiogenic agents, anti-angiogenic agents, anti-coagulants and thrombolytics (e.g., tissue plasminogen activator, hirudin, protein C), neurotransmitters, erythropoiesis-stimulating agents, insulin, growth hormones (e.g., human growth hormone (hGH), follicle-stimulating hormone), metabolic hormones (e.g., incretins), recombinant IL-1 receptor antagonists, and bispecific T-cell engaging molecules (BITEs®).

[0116] Specific examples of therapeutic molecules to which an anti-human FcRn AFFIMER® polypeptide may be linked (e.g., to extend the half-life of the molecules) includes fibroblast growth factor 21 (FGF21), insulin, insulin receptor peptide, GIP (glucose-dependent insulinotropic polypeptide), bone morphogenetic protein 9 (BMP-9), amylin, peptide YY (PYY3-36), pancreatic polypeptide (PP), interleukin 21 (IL-21), glucagon-like peptide 1 (GLP-1), Plectasin, Progranulin, Osteocalcin (OCN), Apelin, GLP-1, Exendin 4, adiponectin, IL-1Ra (Interleukin 1 Receptor Antagonist), VIP (vasoactive intestinal peptide), PACAP (Pituitary adenylate cyclase-activating polypeptide), leptin, INGAP (islet neogenesis associated protein), BMP (bone morphogenetic protein), and osteocalcin (OCN).

[0117] Antibodies

[0118] In some embodiments, a heterologous polypeptide to which an anti-human FcRn AFFIMER® polypeptide is linked is an antibody (e.g., a variable region of an antibody). Thus, the present disclosure, in some embodiments, provides an AFFIMER® polypeptide-antibody fusion protein. In some embodiments, an AFFIMER® polypeptide-antibody fusion protein comprises a full length antibody comprising, for example, at least one AFFIMER® polypeptide sequence appended to the C-terminus or N-terminus of at least one of its VH and/or VL chains (at least one chain of the assembled antibody forms a fusion protein with an AFFIMER® polypeptide). AFFIMER® polypeptide-antibody fusion proteins, in some embodiments, comprise at least one AFFIMER® polypeptide and an antigen binding site or variable region of an antibody fragment.

[0119] An antibody is an immunoglobulin molecule that recognizes and specifically binds a target, such as a polypeptide (e.g., peptide or protein), polynucleotide, carbohydrate, lipid, or a combination of any of the foregoing, through at least one antigen-binding site. The antigen-binding site, in some embodiments, is within the variable region of the immunoglobulin molecule. Antibodies include polyclonal antibodies, monoclonal antibodies, antibody fragments (such as Fab, Fab′, F(ab′)2, and Fv fragments), single chain Fv (scFv) antibodies provided those fragments have been formatted to include an Fc or other FcγIII binding domain, multispecific antibodies, bispecific antibodies, monospecific antibodies, monovalent antibodies, chimeric antibodies, humanized antibodies, human antibodies, fusion proteins comprising an antigen-binding site of an antibody (formatted to include an Fc or other FcγIII binding domain), and any other modified immunoglobulin molecule comprising an antigen-binding site as long as the antibodies exhibit the desired biological activity.

[0120] An antibody can be any of the five major classes of immunoglobulins: IgA, IgD, IgE, IgG, and IgM, or subclasses (isotypes) thereof (e.g., IgG1, IgG2, IgG3, IgG4, IgA1 and IgA2), based on the identity of their heavy-chain constant domains referred to as alpha, delta, epsilon, gamma, and mu.

[0121] A variable region of an antibody can be a variable region of an antibody light chain or a variable region of an antibody heavy chain, either alone or in combination. Generally, the variable region of heavy and light chains each consist of four framework regions (FR) and three complementarity determining regions (CDRs), also known as hypervariable regions. The CDRs in each chain are held together in close proximity by the framework regions and, with the CDRs from the other chain, contribute to the formation of the antigen-binding sites of the antibody. There are at least two techniques for determining CDRs: (1) an approach based on cross-species sequence variability (Kabat et al., 1991, Sequences of Proteins of Immunological Interest, 5th Edition, National Institutes of Health, Bethesda Md.), and (2) an approach based on crystallographic studies of antigen-antibody complexes (Al Lazikani et al., 1997, J. Mol. Biol., 273:927-948). In addition, combinations of these two approaches are sometimes used in the art to determine CDRs.

[0122] Humanized antibodies are forms of non-human (e.g., murine) antibodies that are specific immunoglobulin chains, chimeric immunoglobulins, or fragments thereof that contain minimal non-human sequences. Typically, humanized antibodies are human immunoglobulins in which residues of the CDRs are replaced by residues from the CDRs of a non-human species (e.g., mouse, rat, rabbit, or hamster) that have the desired specificity, affinity, and/or binding capability. In some instances, the Fv framework region residues of a human immunoglobulin are replaced with the corresponding residues in an antibody from a non-human species. A humanized antibody can be further modified by the substitution of additional residues either in the Fv framework region and/or within the replaced non-human residues to refine and optimize antibody specificity, affinity, and/or binding capability. A humanized antibody may comprise variable domains containing all or substantially all of the CDRs that correspond to the non-human immunoglobulin whereas all or substantially all of the framework regions are those of a human immunoglobulin sequence. In some embodiments, the variable domains comprise the framework regions of a human immunoglobulin sequence. In some embodiments, the variable domains comprise the framework regions of a human immunoglobulin consensus sequence. The humanized antibody can also comprise at least a portion of an immunoglobulin constant region or domain (Fc), typically that of a human immunoglobulin. A humanized antibody is usually considered distinct from a chimeric antibody.

[0123] An epitope (also referred to as an antigenic determinant) is a portion of an antigen capable of being recognized and specifically bound by a particular antibody, a particular AFFIMER® polypeptide, or other particular binding domain. When the antigen is a polypeptide, epitopes can be formed both from contiguous amino acids and noncontiguous amino acids juxtaposed by tertiary folding of a protein. Epitopes formed from contiguous amino acids (also referred to as linear epitopes) are typically retained upon protein denaturing, whereas epitopes formed by tertiary folding (also referred to as conformational epitopes) are typically lost upon protein denaturing. An epitope typically includes at least 3, and more usually, at least 5, 6, 7, or 8-10 amino acids in a unique spatial conformation.

[0124] The term “specifically binds to” or is “specific for” refers to measurable and reproducible interactions such as binding between a target and an AFFIMER® polypeptide, antibody or other binding partner, which is determinative of the presence of the target in the presence of a heterogeneous population of molecules including biological molecules. For example, an AFFIMER® polypeptide that specifically binds to a target is an AFFIMER® polypeptide that binds this target with greater affinity, avidity (if multimeric formatted), more readily, and/or with greater duration than it binds to other targets.

[0125] Non-limiting examples of antibodies that may be conjugated to an FcRn-HSA an AFFIMER® polypeptide of the present disclosure 3F8, 8H9, abagovomab, abciximab, abituzumab, abrezekimab, abrilumab, actoxumab, adalimumab, adecatumumab, aducanumab, afasevikumab, afelimomab, alacizumab pegol, alemtuzumab, alirocumab, altumomab pentetate, amatuximab, anatumomab mafenatox, andecaliximab, anetumab ravtansine, anifrolumab, anrukinzumab (IMA-638), apolizumab, aprutumab ixadotin, arcitumomab, ascrinvacumab, aselizumab, atezolizumab, atidortoxumab, atinumab, atorolimumab, avelumab, azintuxizumab vedotin, bapineuzumab, basiliximab, bavituximab, BCD-100, bectumomab, begelomab, belantamab mafodotin, belimumab, bemarituzumab, benralizumab, berlimatoxumab, bermekimab, bersanlimab, bertilimumab, besilesomab, bevacizumab, bezlotoxumab, biciromab, bimagrumab, bimekizumab, birtamimab, bivatuzumab mertansine, bleselumab, blinatumomab, blontuvetmab, blosozumab, bococizumab, brazikumab, brentuximab vedotin, briakinumab, brodalumab, brolucizumab, brontictuzumab, burosumab, cabiralizumab, camidanlumab tesirine, camrelizumab, canakinumab, cantuzumab mertansine, cantuzumab ravtansine, caplacizumab, capromab pendetide, carlumab, carotuximab, catumaxomab, cBR96-doxorubicin immunoconjugate, cedelizumab, cemiplimab, cergutuzumab amunaleukin, certolizumab pegol, cetrelimab, cetuximab, cibisatamab, cirmtuzumab, citatuzumab bogatox, cixutumumab, clazakizumab, clenoliximab, clivatuzumab tetraxetan, codrituzumab, cofetuzumab pelidotin, coltuximab ravtansine, conatumumab, concizumab, cosfroviximab, CR6261, crenezumab, crizanlizumab, crotedumab, cusatuzumab, dacetuzumab, daclizumab, dalotuzumab, dapirolizumab pegol, daratumumab, dectrekumab, demcizumab, denintuzumab mafodotin, denosumab, depatuxizumab mafodotin, derlotuximab biotin, detumomab, dezamizumab, dinutuximab, diridavumab, domagrozumab, dorlimomab aritox, dostarlimab, drozitumab, DS-8201, duligotuzumab, dupilumab, durvalumab, dusigitumab, duvortuxizumab, ecromeximab, eculizumab, edobacomab, edrecolomab, efalizumab, efungumab, eldelumab, elezanumab, elgemtumab, elotuzumab, elsilimomab, emactuzumab, emapalumab, emibetuzumab, emicizumab, enapotamab vedotin, enavatuzumab, enfortumab vedotin, enlimomab pegol, enoblituzumab, enokizumab, enoticumab, ensituximab, epitumomab cituxetan, epratuzumab, eptinezumab, erenumab, erlizumab, ertumaxomab, etaracizumab, etigilimab, etrolizumab, evinacumab, evolocumab, exbivirumab, fanolesomab, faralimomab, faricimab, farletuzumab, fasinumab, 1-BTA05, felvizumab, fezakinumab, fibatuzumab, ficlatuzumab, figitumumab, firivumab, flanvotumab, fletikumab, flotetuzumab, fontolizumab, foralumab, foravirumab, fremanezumab, fresolimumab, frovocimab, frunevetmab, fulranumab, futuximab, galcanezumab, galiximab, gancotamab, ganitumab, gantenerumab, gatipotuzumab, gavilimomab, gedivumab, gemtuzumab ozogamicin, gevokizumab, gilvetmab, gimsilumab, girentuximab, glembatumumab vedotin, golimumab, gomiliximab, gosuranemab, guselkumab, ianalumab, ibalizumab, IBI308, ibritumomab tiuxetan, icrucumab, idarucizumab, ifabotuzumab, igovomab, iladatuzumab vedotin, IMAB362, imalumab, imaprelimab, imciromab, imgatuzumab, inclacumab, indatuximab ravtansine, indusatumab vedotin, inebilizumab, infliximab, inolimomab, inotuzumab ozogamicin, intetumumab, iomab-b, ipilimumab, iratumumab, isatuximab, iscalimab, istiratumab, itolizumab, ixekizumab, keliximab, labetuzumab, lacnotuzumab, ladiratuzumab vedotin, lampalizumab, lanadelumab, landogrozumab, laprituximab emtansine, larcaviximab, lebrikizumab, lemalesomab, lendalizumab, lenvervimab, lenzilumab, lerdelimumab, leronlimab, lesofavumab, letolizumab, lexatumumab, libivirumab, lifastuzumab vedotin, ligelizumab, lilotomab satetraxetan, lintuzumab, lirilumab, lodelcizumab, lokivetmab, loncastuximab tesirine, lorvotuzumab mertansine, losatuxizumab vedotin, lucatumumab, lulizumab pegol, lumiliximab, lumretuzumab, lupartumab amadotin, lutikizumab, mapatumumab, margetuximab, marstacimab, maslimomab, matuzumab, mavrilimumab, mepolizumab, metelimumab, milatuzumab, minretumomab, mirikizumab, mirvetuximab soravtansine, mitumomab, modotuximab, mogamulizumab, monalizumab, morolimumab, mosunetuzumab, motavizumab, moxetumomab pasudotox, muromonab-CD3, nacolomab tafenatox, namilumab, naptumomab estafenatox, naratuximab emtansine, narnatumab, natalizumab, navicixizumab, navivumab, naxitamab, nebacumab, necitumumab, nemolizumab, NEOD001, nerelimomab, nesvacumab, netakimab, nimotuzumab, nirsevimab, nivolumab, nofetumomab merpentan, obiltoxaximab, obinutuzumab, ocaratuzumab, ocrelizumab, odulimomab, ofatumumab, olaratumab, oleclumab, olendalizumab, olokizumab, omalizumab, omburtamab, OMS721, onartuzumab, ontuxizumab, onvatilimab, opicinumab, oportuzumab monatox, oregovomab, orticumab, otelixizumab, otilimab, otlertuzumab, oxelumab, ozanezumab, ozoralizumab, pagibaximab, palivizumab, pamrevlumab, panitumumab, pankomab, panobacumab, parsatuzumab, pascolizumab, pasotuxizumab, pateclizumab, patritumab, pdr001, pembrolizumab, pemtumomab, perakizumab, pertuzumab, pexelizumab, pidilizumab, pinatuzumab vedotin, pintumomab, placulumab, plozalizumab, pogalizumab, polatuzumab vedotin, ponezumab, porgaviximab, prasinezumab, prezalizumab, priliximab, pritoxaximab, pritumumab, PRO 140, quilizumab, racotumomab, radretumab, rafivirumab, ralpancizumab, ramucirumab, ranevetmab, ranibizumab, ravagalimab, ravulizumab, raxibacumab, refanezumab, regavirumab, relatlimab, remtolumab, reslizumab, rilotumumab, rinucumab, risankizumab, rituximab, rivabazumab pegol, rmab, robatumumab, roledumab, romilkimab, romosozumab, rontalizumab, rosmantuzumab, rovalpituzumab tesirine, rovelizumab, rozanolixizumab, ruplizumab, SA237, sacituzumab govitecan, samalizumab, samrotamab vedotin, sarilumab, satralizumab, satumomab pendetide, secukinumab, selicrelumab, seribantumab, setoxaximab, setrusumab, sevirumab, SGN-CD19A, SHP647, sibrotuzumab, sifalimumab, siltuximab, simtuzumab, siplizumab, sirtratumab vedotin, sirukumab, sofituzumab vedotin, solanezumab, solitomab, sonepcizumab, sontuzumab, spartalizumab, stamulumab, sulesomab, suptavumab, sutimlimab, suvizumab, suvratoxumab, tabalumab, tacatuzumab tetraxetan, tadocizumab, talacotuzumab, talizumab, tamtuvetmab, tanezumab, taplitumomab paptox, tarextumab, tavolimab, tefibazumab, telimomab aritox, telisotuzumab vedotin, tenatumomab, teneliximab, teplizumab, tepoditamab, teprotumumab, tesidolumab, tetulomab, tezepelumab, TGN1412, tibulizumab, tigatuzumab, tildrakizumab, timigutuzumab, timolumab, tiragotumab, tislelizumab, tisotumab vedotin, TNX-650, tocilizumab, tomuzotuximab, toralizumab, tosatoxumab, tositumomab, tovetumab, tralokinumab, trastuzumab, trastuzumab emtansine, TRBS07, tregalizumab, tremelimumab, trevogrumab, tucotuzumab celmoleukin, tuvirumab, ublituximab, ulocuplumab, urelumab, urtoxazumab, ustekinumab, utomilumab, vadastuximab talirine, vanalimab, vandortuzumab vedotin, vantictumab, vanucizumab, vapaliximab, varisacumab, varlilumab, vatelizumab, vedolizumab, veltuzumab, vepalimomab, vesencumab, visilizumab, vobarilizumab, volociximab, vonlerolizumab, vopratelimab, vorsetuzumab mafodotin, votumumab, vunakizumab, xentuzumab, XMAB-5574, zalutumumab, zanolimumab, zatuximab, zenocutuzumab, ziralimumab, zolbetuximab (IMAB362, claudiximab), and zolimomab aritox.

[0126] Other Therapeutic Molecules

[0127] Non-limiting examples of cytokines include IL-2, IL-12, TNF-alpha, IFN alpha, IFN beta, IFN gamma, IL-10, IL-15, IL-24, GM-CSF, IL-3, IL-4, IL-5, IL-6, IL-7, IL-9, IL-11, IL-13, LIF, CD80, B70, TNF beta, LT-beta, CD-40 ligand, Fas-ligand, TGF-beta, IL-1alpha and IL-1 beta.

[0128] Non-limiting examples of chemokines include IL-8, GRO alpha, GRO beta, GRO gamma, ENA-78, LDGF-PBP, GCP-2, PF4, Mig, IP-10, SDF-1alpha/beta, BUNZO/STRC33, I-TAC, BLC/BCA-1, MIP-1 alpha, MIP-1 beta, MDC, TECK, TARC, RANTES, HCC-1, HCC-4, DC-CK1, MIP-3 alpha, MIP-3 beta, MCP-1-5, eotaxin, Eotaxin-2, 1-309, MPIF-1, 6Ckine, CTACK, MEC, lymphotactin and fractalkine.

[0129] Non-limiting examples of DNA alkylating agents include nitrogen mustards, such as mechlorethamine, cyclophosphamide (ifosfamide, trofosfamide), chlorambucil (melphalan, prednimustine), bendamustine, uramustine and estramustine; nitrosoureas, such as carmustine (bcnu), lomustine (semustine), fotemustine, nimustine, ranimustine and streptozocin; alkyl sulfonates, such as busulfan (mannosulfan, treosulfan); aziridines, such as carboquone, thiotepa, triaziquone, triethylenemelamine; hydrazines (procarbazine); triazenes such as dacarbazine and temozolomide; altretamine and mitobronitol.

[0130] Non-limiting examples of topoisomerase I inhibitors include campothecin derivatives including CPT-11 (irinotecan), SN-38, APC, NPC, campothecin, topotecan, exatecan mesylate, 9-nitrocamptothecin, 9-aminocamptothecin, lurtotecan, rubitecan, silatecan, gimatecan, diflomotecan, extatecan, BN-80927, DX-8951f, and MAG-CPT as described in Pommier Y. (2006) Nat. Rev. Cancer 6(10):789-802 and U.S. Patent Publication No. 200510250854; protoberberine alkaloids and derivatives thereof including berberrubine and coralyne as described in Li et al. (2000) Biochemistry 39(24):7107-7116 and Gatto et al. (1996) Cancer Res. 15(12):2795-2800; phenanthroline derivatives including benzo[i]phenanthridine, nitidine, and fagaronine as described in Makhey et al. (2003) Bioorg. Med. Chem. 11 (8): 1809-1820; terbenzimidazole and derivatives thereof as described in Xu (1998) Biochemistry 37(10):3558-3566; and anthracycline derivatives including doxorubicin, daunorubicin, and mitoxantrone as described in Foglesong et al. (1992) Cancer Chemother. Pharmacol. 30(2):123-]25, Crow et al. (1994) J. Med. Chem. 37(19):31913194, and Crespi et al. (1986) Biochem. Biophys. Res. Commun. 136(2):521-8. Topoisomerase II inhibitors include, but are not limited to Etoposide and teniposide. Dual topoisomerase I and II inhibitors include, but are not limited to, saintopin and other naphthecenediones, DACA and other Acridine-4-carboxamindes, intoplicine and other benzopyridoindoles, tas-103 and other 7h-indeno[2,1-c]quinoline-7-ones, pyrazoloacridine, XR 11576 and other benzophenazines, XR 5944 and other Dimeric compounds, 7-oxo-7H-dibenz[f,ij]Isoquinolines and 7-oxo-7H-benzo[e]perimidines, and anthracenyl-amino Acid Conjugates as described in Denny and Baguley (2003) Curr. Top. Med. Chem. 3(3):339-353. Some agents inhibit topoisomerase II and have DNA intercalation activity such as, but not limited to, anthracyclines (aclarubicin, daunorubicin, doxorubicin, epirubicin, idarubicin, amrubicin, pirarubicin, valrubicin, zorubicin) and antracenediones (mitoxantrone and pixantrone).

[0131] Non-limiting examples of endoplasmic reticulum stress inducing agents include dimethyl-celecoxib (DMC), nelfinavir, celecoxib, and boron radiosensitizers (i.e. velcade (bortezomib).

[0132] Non-limiting examples of platinum-based compound include carboplatin, cisplatin, nedaplatin, oxaliplatin, triplatin tetranitrate, satraplatin, aroplatin, lobaplatin, and JM-216. (see McKeage et al. (1997) J. Clin. Oncol. 201:1232-1237 and in general, CHEMOTHERAPY FOR GYNECOLOGICAL NEOPLASM, CURRENT THERAPY AND NOVEL APPROACHES, in the Series Basic and Clinical Oncology, Angioli et al. Eds., 2004).

[0133] Non-limiting examples of antimetabolite agents include folic acid-based, e.g., dihydrofolate reductase inhibitors, such as aminopterin, methotrexate and pemetrexed; thymidylate synthase inhibitors, such as raltitrexed, pemetrexed; purine based, e.g., an adenosine deaminase inhibitor, such as pentostatin, a thiopurine, such as thioguanine and mercaptopurine, a halogenated/ribonucleotide reductase inhibitor, such as cladribine, clofarabine, fludarabine, or a guanine/guanosine: thiopurine, such as thioguanine; or pyrimidine based, e.g., cytosine/cytidine: hypomethylating agent, such as azacitidine and decitabine, a dna polymerase inhibitor, such as cytarabine, a ribonucleotide reductase inhibitor, such as gemcitabine, or a thymine/thymidine: thymidylate synthase inhibitor, such as a fluorouracil (5-FU). Equivalents to 5-FU include prodrugs, analogs and derivative thereof such as 5′deoxy 5 fluorouridine(doxifluoroidine), 1-tetrahydrofuranyl-5-fluorouracil (FTORAFUR®), capecitabine (XELODA®), S-I (MBMS-247616, consisting of tegafur and two modulators, a 5-chloro-2,4-dihydroxypyridine and potassium oxonate), ralititrexed (TOMUDEX®), no latrexed (Thymitaq, AG337), LY231514 and ZD9331, as described for example in Papamicheal (1999) The Oncologist 4:478-487.

[0134] Non-limiting examples of vincalkaloids vinblastine, vincristine, vinflunine, vindesine and vinorelbine.

[0135] Non-limiting examples of taxanes include docetaxel, larotaxel, ortataxel, paclitaxel and tesetaxel. an example of an epothilone is iabepilone.

[0136] Non-limiting examples of enzyme inhibitors include farnesyltransferase inhibitors (tipifamib); CDK inhibitor (alvocidib, seliciclib); proteasome inhibitor (bortezomib); phosphodiesterase inhibitor (anagrelide; rolipram); IMP dehydrogenase inhibitor (tiazofurine); and lipoxygenase inhibitor (masoprocol). Examples of receptor antagonists include, but are not limited to ERA (atrasentan); retinoid X receptor (bexarotene); and a sex steroid (testolactone).

[0137] Non-limiting examples of tyrosine kinase inhibitors include inhibitors to ErbB: HER1/EGFR (erlotinib, gefitinib, lapatinib, vandetanib, sunitinib, neratinib); HER2/neu (lapatinib, neratinib); RTK class III: C-kit (axitinib, sunitinib, sorafenib), FLT3 (lestaurtinib), PDGFR (axitinib, sunitinib, sorafenib); and VEGFR (vandetanib, semaxanib, cediranib, axitinib, sorafenib); bcr-abl (imatinib, nilotinib, dasatinib); Src (bosutinib) and Janus kinase 2 (lestaurtinib).

[0138] Non-limiting examples of chemotherapeutic agents include amsacrine, Trabectedin, retinoids (alitretinoin, tretinoin), arsenic trioxide, asparagine depleter asparaginase/pegaspargase), celecoxib, demecolcine, elesclomol, elsamitrucin, etoglucid, lonidamine, lucanthone, mitoguazone, mitotane, oblimersen, temsirolimus, and vorinostat.

[0139] Non-limiting examples of additional therapeutic molecules that can be linked to AFFIMER® polypeptides of the disclosure include flomoxef; fortimicin(s); gentamicin(s); glucosulfone solasulfone; gramicidin S; gramicidin(s); grepafloxacin; guamecycline; hetacillin; isepamicin; josamycin; kanamycin(s); flomoxef; fortimicin(s); gentamicin(s); glucosulfone solasulfone; gramicidin S; gramicidin(s); grepafloxacin; guamecycline; hetacillin; isepamicin; josamycin; kanamycin(s); bacitracin; bambermycin(s); biapenem; brodimoprim; butirosin; capreomycin; carbenicillin; carbomycin; carumonam; cefadroxil; cefamandole; cefatrizine; cefbuperazone; cefclidin; cefdinir; cefditoren; cefepime; cefetamet; cefixime; cefinenoxime; cefininox; cladribine; apalcillin; apicycline; apramycin; arbekacin; aspoxicillin; azidamfenicol; aztreonam; cefodizime; cefonicid; cefoperazone; ceforamide; cefotaxime; cefotetan; cefotiam; cefozopran; cefpimizole; cefpiramide; cefpirome; cefprozil; cefroxadine; cefteram; ceftibuten; cefuzonam; cephalexin; cephaloglycin; cephalosporin C; cephradine; chloramphenicol; chlortetracycline; clinafloxacin; clindamycin; clomocycline; colistin; cyclacillin; dapsone; demeclocycline; diathymosulfone; dibekacin; dihydrostreptomycin; 6-mercaptopurine; thioguanine; capecitabine; docetaxel; etoposide; gemcitabine; topotecan; vinorelbine; vincristine; vinblastine; teniposide; melphalan; methotrexate; 2-p-sulfanilyanilinoethanol; 4,4′sulfinydianilin; 4-sulfanilamidosalicylic acid; butorphanol; nalbuphine. streptozocin; doxorubicin; daunorubicin; plicamycin; idarubicin; mitomycin C; pentostatin; mitoxantrone; cytarabine; fludarabine phosphate; butorphanol; nalbuphine. streptozocin; doxorubicin; daunorubicin; plicamycin; idarubicin; mitomycin C; pentostatin; mitoxantrone; cytarabine; fludarabine phosphate; acediasulfone; acetosulfone; amikacin; amphotericin B; ampicillin; atorvastatin; enalapril; ranitidine; ciprofloxacin; pravastatin; clarithromycin; cyclosporin; famotidine; leuprolide; acyclovir; paclitaxel; azithromycin; lamivudine; budesonide; albuterol; indinavir; metformin; alendronate; nizatidine; zidovudine; carboplatin; metoprolol; amoxicillin; diclofenac; lisinopril; ceftriaxone; captopril; salmeterol; xinafoate; imipenem; cilastatin; benazepril; cefaclor; ceftazidime; morphine; dopamine; bialamicol; fluvastatin; phenamidine; podophyllinic acid 2-ethylhydrazine; acriflavine; chloroazodin; arsphenamine; amicarbilide; aminoquinuride; quinapril; oxymorphone; buprenorphine; floxuridine; dirithromycin; doxycycline; enoxacin; enviomycin; epicillin; erythromycin; leucomycin(s); lincomycin; lomefloxacin; lucensomycin; lymecycline; meclocycline; meropenem; methacycline; micronomicin; midecamycin(s); minocycline; moxalactam; mupirocin; nadifloxacin; natamycin; neomycin; netilmicin; norfloxacin; oleandomycin; oxytetracycline; p-sulfanilylbenzylamine; panipenem; paromomycin; pazufloxacin; penicillin N; pipacycline; pipemidic acid; polymyxin; primycin; quinacillin; ribostamycin; rifamide; rifampin; rifamycin SV; rifapentine; rifaximin; ristocetin; ritipenem; rokitamycin; rolitetracycline; rosaramycin; roxithromycin; salazosulfadimidine; sancycline; sisomicin; sparfloxacin; spectinomycin; spiramycin; streptomycin; succisulfone; sulfachrysoidine; sulfaloxic acid; sulfamidochrysoidine; sulfanilic acid; sulfoxone; teicoplanin; temafloxacin; temocillin; tetroxoprim; thiamphenicol; thiazolsulfone; thiostrepton; ticarcillin; tigemonam; tobramycin; tosufloxacin; trimethoprim; trospectomycin; trovafloxacin; tuberactinomycin; vancomycin; azaserine; candicidin(s); chlorphenesin; dermostatin(s); filipin; fungichromin; mepartricin; nystatin; oligomycin(s); perimycin A; tubercidin; 6-azauridine; 6-diazo-5-oxo-L-norleucine; aclacinomycin(s); ancitabine; anthramycin; azacitadine; azaserine; bleomycin(s); ethyl biscoumacetate; ethylidene dicoumarol; iloprost; lamifiban; taprostene; tioclomarol; tirofiban; amiprilose; bucillamine; gusperimus; gentisic acid; glucamethacin; glycol salicylate; meclofenamic acid; mefenamic acid; mesalamine; niflumic acid; olsalazine; oxaceprol; S-enosylmethionine; salicylic acid; salsalate; sulfasalazine; tolfenamic acid; carubicin; carzinophillin A; chlorozotocin; chromomycin(s); denopterin; doxifluridine; edatrexate; eflornithine; elliptinium; enocitabine; epirubicin; mannomustine; menogaril; mitobronitol; mitolactol; mopidamol; mycophenolic acid; nogalamycin; olivomycin(s); peplomycin; pirarubicin; piritrexim; prednimustine; procarbazine; pteropterin; puromycin; ranimustine; streptonigrin; thiamiprine; mycophenolic acid; procodazole; romurtide; sirolimus (rapamycin); tacrolimus; butethamine; fenalcomine; hydroxytetracaine; naepaine; orthocaine; piridocaine; salicyl alcohol; 3-amino-4-hydroxybutyric acid; aceclofenac; alminoprofen; amfenac; bromfenac; bromosaligenin; bumadizon; carprofen; diclofenac; diflunisal; ditazol; enfenamic acid; etodolac; etofenamate; fendosal; fepradinol; flufenamic acid; Tomudex (N-[[5-[[(1,4-Dihydro-2-methyl-4-oxo-6-quinazolinyemethyl]methylamino]-2-thienyl]carbonyl]-L-glutamic acid), trimetrexate, tubercidin, ubenimex, vindesine, zorubicin; argatroban; coumetarol and dicoumarol.

[0140] Non-limiting examples of cytotoxic factors include diptheria toxin, Pseudomonas aeruginosa exotoxin A chain, ricin A chain, abrin A chain, modeccin A chain, alpha-sarcin, Aleurites fordii proteins and compounds (e.g., fatty acids), dianthin proteins, Phytoiacca americana proteins PAPI, PAPII, and PAP-S, Momordica charantia inhibitor, curcin, crotin, Saponaria officinalis inhibitor, mitogellin, restrictocin, phenomycin, and enomycin.

[0141] Non-limiting examples of neurotransmitters include arginine, aspartate, glutamate, gamma-aminobutyric acid, glycine, D-serine, acetylcholine, dopamine, norepinephrine (noradrenaline), epinephrine (adrenaline), serotonin (5-hydroxytryptamine), histamine, phenethylamine, N-methylphenethylamine, tyramine, octopamine, synephrine, tryptamine, N-methyltryptamine, anandamide, 2-arachidonoylglycerol, 2-arachidonyl glyceryl ether, N-arachidonoyl dopamine, virodhamine, adenosine, adenosine triphosphate, bradykinin, corticotropin-releasing hormone, urocortin, galanin, galanin-like peptide, gastrin, cholecystokinin, adrenocorticotropic hormone, proopiomelanocortin, melanocyte-stimulating hormones, vasopressin, oxytocin, Neurophysin I, Neurophysin II, Neuromedin U, Neuropeptide B, Neuropeptide S, Neuropeptide Y, Pancreatic polypeptide, Peptide YY, enkephalin, dynorphin, endorphin, endomorphin, nociceptin/orphanin FQ, Orexin A, Orexin B, kisspeptin, Neuropeptide FP, prolactin-releasing peptide, pyroglutamylated rfamide peptide, secretin, motilin, glucagon, glucagon-like peptide-1, glucagon-like peptide-2, vasoactive intestinal peptide, growth hormone-releasing hormone, pituitary adenylate cyclase-activating peptide, somatostatin, Neurokinin A, Neurokinin B, Substance P, Neuropeptide K, agouti-related peptide, N-acetylaspartylglutamate, cocaine- and amphetamine-regulated transcript, bombesin, gastrin releasing peptide, gonadotropin-releasing hormone, melanin-concentrating hormone, nitric oxide, carbon monoxide, and hydrogen sulfide.

[0142] Non-limiting examples of metabolic hormones, such as incretins (which stimulate a decrease in blood glucose levels), include glucagon-like peptide-1 (GLP-1) and gastric inhibitory peptide (GIP) and anologs thereof, such as dulaglutide (TRULICITY®), exenatide (BYETTA®), liraglutide (VICTOZA®), and exenatide extended-release (BYDUREON®).

### Pharmaceutical Compositions/Formulations

[0143] The present disclosure also provides pharmaceutical compositions comprising an anti-human FcRn AFFIMER® polypeptide (“AFFIMER® polypeptide”) described herein and a pharmaceutically acceptable vehicle. In some embodiments, the pharmaceutical compositions find use in immunotherapy. In some embodiments, the pharmaceutical compositions find use in immuno-oncology. In some embodiments, the compositions find use in inhibiting tumor growth. In some embodiments, the pharmaceutical compositions find use in inhibiting tumor growth in a subject (e.g., a human patient). In some embodiments, the compositions find use in treating cancer. In some embodiments, the pharmaceutical compositions find use in treating cancer, an inflammatory disorder, a cardiovascular disorder, a metabolic disorder, or an autoimmune disorder in a subject (e.g., a human patient).

[0144] Formulations are prepared for storage and use by combining a purified AFFIMER® polypeptide of the present disclosure with a pharmaceutically acceptable vehicle (e.g., a carrier or excipient). Those of skill in the art generally consider pharmaceutically acceptable carriers, excipients, and/or stabilizers to be inactive ingredients of a formulation or pharmaceutical composition.

[0145] In some embodiments, a AFFIMER® polypeptide described herein is lyophilized and/or stored in a lyophilized form. In some embodiments, a formulation comprising a AFFIMER® polypeptide described herein is lyophilized.

[0146] Suitable pharmaceutically acceptable vehicles include, but are not limited to, nontoxic buffers such as phosphate, citrate, and other organic acids; salts such as sodium chloride; antioxidants including ascorbic acid and methionine; preservatives such as octadecyldimethylbenzyl ammonium chloride, hexamethonium chloride, benzalkonium chloride, benzethonium chloride, phenol, butyl or benzyl alcohol, alkyl parabens, such as methyl or propyl paraben, catechol, resorcinol, cyclohexanol, 3-pentanol, and m-cresol; low molecular weight polypeptides (e.g., less than about 10 amino acid residues); proteins such as serum albumin, gelatin, or immunoglobulins; hydrophilic polymers such as polyvinylpyrrolidone; amino acids such as glycine, glutamine, asparagine, histidine, arginine, or lysine; carbohydrates such as monosaccharides, disaccharides, glucose, mannose, or dextrins; chelating agents such as EDTA; sugars such as sucrose, mannitol, trehalose or sorbitol; salt-forming counter-ions such as sodium; metal complexes such as Zn-protein complexes; and non-ionic surfactants such as TWEEN or polyethylene glycol (PEG). (Remington: The Science and Practice of Pharmacy, 22nd Edition, 2012, Pharmaceutical Press, London).

[0147] The pharmaceutical compositions of the present disclosure can be administered in any number of ways for either local or systemic treatment. Administration can be topical by epidermal or transdermal patches, ointments, lotions, creams, gels, drops, suppositories, sprays, liquids and powders; pulmonary by inhalation or insufflation of powders or aerosols, including by nebulizer, intratracheal, and intranasal; oral; or parenteral including intravenous, intraarterial, intratumoral, subcutaneous, intraperitoneal, intramuscular (e.g., injection or infusion), or intracranial (e.g., intrathecal or intraventricular).

[0148] In some embodiments, a composition is formulated for topical delivery such that the when applied to the skin, for example, the AFFIMER® polypeptide penetrates the skin (crosses epithelial and mucosal barriers) to function systemically.

[0149] The therapeutic formulation can be in unit dosage form. Such formulations include tablets, pills, capsules, powders, granules, solutions or suspensions in water or non-aqueous media, or suppositories. In solid compositions, such as tablets, the principal active ingredient is mixed with a pharmaceutical carrier. Conventional tableting ingredients include corn starch, lactose, sucrose, sorbitol, talc, stearic acid, magnesium stearate, dicalcium phosphate or gums, and diluents (e.g., water). These can be used to form a solid preformulation composition containing a homogeneous mixture of a compound of the present disclosure, or a non-toxic pharmaceutically acceptable salt thereof. The solid preformulation composition is then subdivided into unit dosage forms of a type described above. The tablets, pills, etc. of the formulation or composition can be coated or otherwise compounded to provide a dosage form affording the advantage of prolonged action. For example, the tablet or pill can comprise an inner composition covered by an outer component. Furthermore, the two components can be separated by an enteric layer that serves to resist disintegration and permits the inner component to pass intact through the stomach or to be delayed in release. A variety of materials can be used for such enteric layers or coatings, such materials include a number of polymeric acids and mixtures of polymeric acids with such materials as shellac, cetyl alcohol and cellulose acetate.

[0150] The AFFIMER® polypeptides described herein can also be entrapped in microcapsules. Such microcapsules are prepared, for example, by coacervation techniques or by interfacial polymerization, for example, hydroxymethylcellulose or gelatin-microcapsules and poly-(methylmethacylate) microcapsules, respectively, in colloidal drug delivery systems (for example, liposomes, albumin microspheres, microemulsions, nanoparticles and nanocapsules) or in macroemulsions as described in Remington: The Science and Practice of Pharmacy, 22.sup.nd Edition, 2012, Pharmaceutical Press, London.

[0151] In some embodiments, pharmaceutical formulations include an AFFIMER® polypeptide of the present disclosure complexed with liposomes. Methods to produce liposomes are known to those of skill in the art. For example, some liposomes can be generated by reverse phase evaporation with a lipid composition comprising phosphatidylcholine, cholesterol, and PEG-derivatized phosphatidylethanolamine (PEG-PE). Liposomes can be extruded through filters of defined pore size to yield liposomes with the desired diameter.

[0152] In some embodiments, sustained-release preparations comprising AFFIMER® polypeptides described herein can be produced. Suitable examples of sustained-release preparations include semi-permeable matrices of solid hydrophobic polymers containing a AFFIMER® polypeptide, where the matrices are in the form of shaped articles (e.g., films or microcapsules). Examples of sustained-release matrices include polyesters, hydrogels such as poly(2-hydroxyethyl-methacrylate) or poly(vinyl alcohol), polylactides, copolymers of L-glutamic acid and 7 ethyl-L-glutamate, non-degradable ethylene-vinyl acetate, degradable lactic acid-glycolic acid copolymers such as the LUPRON DEPOT™ (injectable microspheres composed of lactic acid-glycolic acid copolymer and leuprolide acetate), sucrose acetate isobutyrate, and poly-D-(−)-3-hydroxybutyric acid.

[0153] For the treatment of a disease, the appropriate dosage of an AFFIMER® polypeptide of the present disclosure depends on the type of disease to be treated, the severity and course of the disease, the responsiveness of the disease, whether the AFFIMER® polypeptide is administered for therapeutic or preventative purposes, previous therapy, the patient's clinical history, and so on, all at the discretion of the treating physician. The AFFIMER® polypeptide can be administered one time or over a series of treatments lasting from several days to several months, or until a cure is affected or a diminution of the disease state is achieved (e.g., reduction in tumor size). Optimal dosing schedules can be calculated from measurements of drug accumulation in the body of the patient and will vary depending on the relative potency of an individual agent. The administering physician can determine optimum dosages, dosing methodologies, and repetition rates. In some embodiments, dosage is from 0.01 mg to 100 mg/kg of body weight, from 0.1 mg to 100 mg/kg of body weight, from 1 mg to 100 mg/kg of body weight, from 1 mg to 100 mg/kg of body weight, 1 mg to 80 mg/kg of body weight from 10 mg to 100 mg/kg of body weight, from 10 mg to 75 mg/kg of body weight, or from 10 mg to 50 mg/kg of body weight. In some embodiments, the dosage of the AFFIMER® polypeptide is from about 0.1 mg to about 20 mg/kg of body weight. In some embodiments, the dosage of the AFFIMER® polypeptide is about 0.1 mg/kg of body weight. In some embodiments, the dosage of the AFFIMER® polypeptide is about 0.25 mg/kg of body weight. In some embodiments, the dosage of the AFFIMER® polypeptide is about 0.5 mg/kg of body weight. In some embodiments, the dosage of the AFFIMER® polypeptide is about 1 mg/kg of body weight. In some embodiments, the dosage of the AFFIMER® polypeptide is about 1.5 mg/kg of body weight. In some embodiments, the dosage of the AFFIMER® polypeptide is about 2 mg/kg of body weight. In some embodiments, the dosage of the AFFIMER® polypeptide is about 2.5 mg/kg of body weight. In some embodiments, the dosage of the AFFIMER® polypeptide is about 5 mg/kg of body weight. In some embodiments, the dosage of the AFFIMER® polypeptide is about 7.5 mg/kg of body weight. In some embodiments, the dosage of the AFFIMER® polypeptide is about 10 mg/kg of body weight. In some embodiments, the dosage of the AFFIMER® polypeptide is about 12.5 mg/kg of body weight. In some embodiments, the dosage of the AFFIMER® polypeptide is about 15 mg/kg of body weight. In some embodiments, the dosage can be given once or more daily, weekly, monthly, or yearly. In some embodiments, the AFFIMER® polypeptide is given once every week, once every two weeks, once every three weeks, or once every four weeks.

[0154] In some embodiments, an AFFIMER® polypeptide may be administered at an initial higher “loading” dose, followed by one or more lower doses. In some embodiments, the frequency of administration may also change. In some embodiments, a dosing regimen may comprise administering an initial dose, followed by additional doses (or “maintenance” doses) once a week, once every two weeks, once every three weeks, or once every month. For example, a dosing regimen may comprise administering an initial loading dose, followed by a weekly maintenance dose of, for example, one-half of the initial dose. Or a dosing regimen may comprise administering an initial loading dose, followed by maintenance doses of, for example one-half of the initial dose every other week. Or a dosing regimen may comprise administering three initial doses for 3 weeks, followed by maintenance doses of, for example, the same amount every other week.

[0155] As is known to those of skill in the art, administration of any therapeutic agent may lead to side effects and/or toxicities. In some cases, the side effects and/or toxicities are so severe as to preclude administration of the particular agent at a therapeutically effective dose. In some cases, drug therapy must be discontinued, and other agents may be tried. However, many agents in the same therapeutic class often display similar side effects and/or toxicities, meaning that the patient either has to stop therapy, or if possible, suffer from the unpleasant side effects associated with the therapeutic agent.

[0156] In some embodiments, the dosing schedule may be limited to a specific number of administrations or “cycles”. In some embodiments, the AFFIMER® polypeptide is administered for 3, 4, 5, 6, 7, 8, or more cycles. For example, the AFFIMER® polypeptide is administered every 2 weeks for 6 cycles, the AFFIMER® polypeptide is administered every 3 weeks for 6 cycles, the AFFIMER® polypeptide is administered every 2 weeks for 4 cycles, the AFFIMER® polypeptide is administered every 3 weeks for 4 cycles, etc. Dosing schedules can be decided upon and subsequently modified by those skilled in the art.

[0157] Thus, the present disclosure provides methods of administering to a subject the polypeptides or agents described herein comprising using an intermittent dosing strategy for administering one or more agents, which may reduce side effects and/or toxicities associated with administration of an AFFIMER® polypeptide, therapeutic agent, etc. In some embodiments, a method for treating cancer in a human subject comprises administering to the subject a therapeutically effective dose of an AFFIMER® polypeptide in combination with a therapeutically effective dose of a therapeutic agent, wherein one or both of the agents are administered according to an intermittent dosing strategy. In some embodiments, the intermittent dosing strategy comprises administering an initial dose of an AFFIMER® polypeptide to the subject and administering subsequent doses of the AFFIMER® polypeptide about once every 2 weeks. In some embodiments, the intermittent dosing strategy comprises administering an initial dose of an AFFIMER® polypeptide to the subject and administering subsequent doses of the AFFIMER® polypeptide about once every 3 weeks. In some embodiments, the intermittent dosing strategy comprises administering an initial dose of an AFFIMER® polypeptide to the subject and administering subsequent doses of the AFFIMER® polypeptide about once every 4 weeks. In some embodiments, the AFFIMER® polypeptide is administered using an intermittent dosing strategy and the therapeutic agent is administered weekly.

### Polynucleotides

[0158] A polynucleotide (also referred to as a nucleic acid) is a polymer of nucleotides of any length, and may include deoxyribonucleotides, ribonucleotides, modified nucleotides or bases, and/or their analogs, or any substrate that can be incorporated into a polymer by DNA or RNA polymerase. In some embodiments, a polynucleotide herein encodes a polypeptide, such as an anti-human FcRn AFFIMER® polypeptide. As known in the art, the order of deoxyribonucleotides in a polynucleotide determines the order of amino acids along the encoded polypeptide (e.g., protein).

[0159] A polynucleotide sequence may be any sequence of deoxyribonucleotides and/or ribonucleotides, may be single-stranded, double-stranded, or partially double-stranded. The length of a polynucleotide may vary and is not limited. Thus, a polynucleotide may comprise, for example, 2 to 1,000,000 nucleotides. In some embodiments, a polynucleotide has a length of 100 to 100,000, a length of 100 to 10,000, a length of 100 to 1,000, a length of 100 to 500, a length of 200 to 100,000, a length of 200 to 10,000, a length of 200 to 1,000, or a length of 200 to 500 nucleotides.

[0160] A vector herein refers to a vehicle for delivering a molecule to a cell. In some embodiments, a vector is an expression vector comprising a promoter (e.g., inducible or constitutive) operably linked to a polynucleotide sequence encoding a polypeptide. Non-limiting examples of vectors include viral vectors (e.g., adenoviral vectors, adeno-associated virus vectors, and retroviral vectors), naked DNA or RNA expression vectors, plasmids, cosmids, phage vectors, DNA and/or RNA expression vectors associated with cationic condensing agents, and DNA and/or RNA expression vectors encapsulated in liposomes. Vectors may be transfected into a cell, for example, using any transfection method, including, for example, calcium phosphate-DNA co-precipitation, DEAE-dextran-mediated transfection, polybrene-mediated transfection, electroporation, microinjection, liposome fusion, lipofection, protoplast fusion, retroviral infection, or biolistics technology (biolistics).

### Gene Delivery

[0161] An alternative approach to the delivery of therapeutic anti-human FcRn AFFIMER® polypeptide would be to leave the production of the therapeutic polypeptide to the body itself. A multitude of clinical studies have illustrated the utility of in vivo gene transfer into cells using a variety of different delivery systems. In vivo gene transfer seeks to administer to patients the nucleotide sequence of the anti-human FcRn AFFIMER® polypeptide, rather than the anti-human FcRn AFFIMER® polypeptide itself. This allows the patient's body to produce the anti-human FcRn AFFIMER® polypeptide of interest for a prolonged period of time, and secrete it either systemically or locally, depending on the production site. Gene-based nucleotides encoding anti-human FcRn AFFIMER® polypeptides can present a labor- and cost-effective alternative to the conventional production, purification and administration of the polypeptide version of the anti-human FcRn AFFIMER® polypeptide. A number of antibody expression platforms have been pursued in vivo to which delivery of polynucleotides anti-human FcRn AFFIMER® polypeptide can be adapted: these include viral vectors, naked DNA and RNA. The use of gene transfer with polynucleotides encoding anti-human FcRn AFFIMER® polypeptide cannot only enable cost-savings by reducing the cost of goods and of production but may also be able to reduce the frequency of drug administration. Overall, a prolonged in vivo production of the therapeutic anti-human FcRn AFFIMER® polypeptides by expression of the polynucleotides encoding anti-human FcRn AFFIMER® polypeptides can contribute to (i) a broader therapeutic or prophylactic application of anti-human FcRn AFFIMER® polypeptides in price-sensitive conditions, (ii) an improved accessibility to therapy in both developed and developing countries, and (iii) more effective and affordable treatment modalities. In addition to in vivo gene transfer, cells can be harvested from the host (or a donor), engineered with polynucleotides encoding anti-human FcRn AFFIMER® polypeptides to produce anti-human FcRn AFFIMER® polypeptides and re-administered to patients.

[0162] The tumor presents a site for the transfer of polynucleotides encoding anti-human FcRn AFFIMER® polypeptides, targeted either via intravenous or direct injection/electroporation. Indeed, intratumoral expression of polynucleotides encoding anti-human FcRn AFFIMER® polypeptides can allow for a local production of the therapeutic anti-human FcRn AFFIMER® polypeptides, waiving the need for high systemic anti-human FcRn AFFIMER® polypeptide levels that might otherwise be required to penetrate and impact solid tumors. See, for example, Beckman et al. (2015) “Antibody constructs in cancer therapy: protein engineering strategies to improve exposure in solid tumors” Cancer 109(2):170-9 and Dronca et al. (2015) “Immunomodulatory antibody therapy of cancer: the closer, the better” Clin Cancer Res. 21(5):944-6.

[0163] The success of gene therapy has largely been driven by improvements in nonviral and viral gene transfer vectors. An array of physical and chemical nonviral methods have been used to transfer DNA and mRNA to mammalian cells and a substantial number of these have been developed as clinical stage technologies for gene therapy, both ex vivo and in vivo, and are readily adapted for delivery of the polynucleotides encoding anti-human FcRn AFFIMER® polypeptides of the present disclosure. To illustrate, cationic liposome technology can be employed, which is based on the ability of amphipathic lipids, possessing a positively charged head group and a hydrophobic lipid tail, to bind to negatively charged DNA or RNA and form particles that generally enter cells by endocytosis. Some cationic liposomes also contain a neutral co-lipid, thought to enhance liposome uptake by mammalian cells. See, for example, Feigner et al. (1987) Lipofection: a highly efficient, lipid-mediated DNA-transfection procedure. MNAS 84:7413-7417; San et al. (1983) “Safety and short-term toxicity of a novel cationic lipid formulation for human gene therapy” Hum. Gene Ther. 4:781-788; Xu et al. (1996) “Mechanism of DNA release from cationic liposome/DNA complexes used in cell transfection” Biochemistry 35:5616-5623; and Legendre et al. (1992) “Delivery of plasmid DNA into mammalian cell lines using pH-sensitive liposomes: comparison with cationic liposomes” Pharm. Res. 9, 1235-1242.

[0164] Similarly, other polycations, such as poly-1-lysine and polyethylene-imine, can be used to deliver polynucleotides encoding anti-human FcRn AFFIMER® polypeptides. These polycations complex with nucleic acids via charge interaction and aid in the condensation of DNA or RNA into nanoparticles, which are then substrates for endosome-mediated uptake. Several of these cationic nucleic acid complex technologies have been developed as potential clinical products, including complexes with plasmid DNA, oligodeoxynucleotides, and various forms of synthetic RNA. Modified (and unmodified or “naked”) DNA and RNA have also been shown to mediate successful gene transfer in a number of circumstances and can also be used as systems for delivery of polynucleotides encoding anti-human FcRn AFFIMER® polypeptides. These include the use of plasmid DNA by direct intramuscular injection, the use of intratumoral injection of plasmid DNA. See, for example, Rodrigo et al. (2012) “De novo automated design of small RNA circuits for engineering synthetic riboregulation in living cells” PNAS 109:15271-15276; Oishi et al. (2005) “Smart polyion complex micelles for targeted intracellular delivery of PEGylated antisense oligonucleotides containing acid-labile linkages” Chembiochem. 6:718-725; Bhatt et al. (2015) “Microbeads mediated oral plasmid DNA delivery using polymethacrylate vectors: an effectual groundwork for colorectal cancer” Drug Deliv. 22:849-861; Ulmer et al. (1994) Protective immunity by intramuscular injection of low doses of influenza virus DNA vaccines” Vaccine 12: 1541-1544; and Heinzerling et al. (2005) “Intratumoral injection of DNA encoding human interleukin 12 into patients with metastatic melanoma: clinical efficacy” Hum. Gene Ther. 16:35-48.

[0165] Viral vectors are currently used as a delivery vehicle in the vast majority of pre-clinical and clinical gene therapy trials and in the first to be approved directed gene therapy. See Gene Therapy Clinical Trials Worldwide 2017 (abedia.com/wiley/). The main driver thereto is their exceptional gene delivery efficiency, which reflects a natural evolutionary development; viral vector systems are attractive for gene delivery, because viruses have evolved the ability to cross through cellular membranes by infection, thereby delivering nucleic acids such as polynucleotides encoding anti-human FcRn AFFIMER® polypeptides to target cells. Pioneered by adenoviral systems, the field of viral vector-mediated antibody gene transfer made significant strides in the past decades. The myriad of successfully evaluated administration routes, pre-clinical models and disease indications puts the capabilities of antibody gene transfer at full display through which the skilled artisan would readily be able to identify and adapt antibody gene transfer systems and techniques for in vivo delivery of polynucleotides constructs encoding anti-human FcRn AFFIMER® polypeptides. In the context of vectored intratumoral polynucleotides encoding anti-human FcRn AFFIMER® polypeptides gene transfer, oncolytic viruses have a distinct advantage, as they can specifically target tumor cells, boost anti-human FcRn AFFIMER® polypeptide expression, and amplify therapeutic responses—such as to anti-human FcRn AFFIMER® polypeptides.

[0166] In vivo gene transfer of polynucleotides encoding anti-human FcRn AFFIMER® polypeptides can also be accomplished by use of nonviral vectors, such as expression plasmids. Nonviral vectors are easily produced and do not seem to induce specific immune responses. Muscle tissue is most often used as target tissue for transfection, because muscle tissue is well vascularized and easily accessible, and myocytes are long-lived cells. Intramuscular injection of naked plasmid DNA results in transfection of a certain percentage of myocytes. Using this approach, plasmid DNA encoding cytokines and cytokine/IgG1 chimeric proteins has been introduced in vivo and has positively influenced (autoimmune) disease outcome.

[0167] In some instances, in order to increase transfection efficiency via so-called intravascular delivery in which increased gene delivery and expression levels are achieved by inducing a short-lived transient high pressure in the veins. Special blood-pressure cuffs that may facilitate localized uptake by temporarily increasing vascular pressure and can be adapted for use in human patients for this type of gene delivery. See, for example, Zhang et al. (2001) “Efficient expression of naked DNA delivered intraarterially to limb muscles of nonhuman primates” Hum. Gene Ther., 12:427-438

[0168] Increased efficiency can also be gained through other techniques, such as in which delivery of the nucleic acid is improved by use of chemical carriers—cationic polymers or lipids—or via a physical approach—gene gun delivery or electroporation. See Tranchant et al. (2004) “Physicochemical optimisation of plasmid delivery by cationic lipids” J. Gene Med., 6 (Suppl. 1): S24-S35; and Niidome et al. (2002) “Gene therapy progress and prospects: nonviral vectors” Gene Ther., 9:1647-1652. Electroporation is especially regarded as an interesting technique for nonviral gene delivery. Somiari, et al. (2000) “Theory and in vivo application of electroporative gene delivery” Mol. Ther. 2:178-187; and Jaroszeski et al. (1999) “In vivo gene delivery by electroporation” Adv. Drug Delivery Rev., 35:131-137. With electroporation, pulsed electrical currents are applied to a local tissue area to enhance cell permeability, resulting in gene transfer across the membrane. Research has shown that in vivo gene delivery can be at least 10-100 times more efficient with electroporation than without. See, for example, Aihara et al. (1998) “Gene transfer into muscle by electroporation in vivo” Nat. Biotechnol. 16:867-870; Mir, et al. (1999) “High-efficiency gene transfer into skeletal muscle mediated by electric pulses” PNAS 96:4262-4267; Rizzuto, et al. (1999) “Efficient and regulated erythropoietin production by naked DNA injection and muscle electroporation” PNAS 96: 6417-6422; and Mathiesen (1999) “Electropermeabilization of skeletal muscle enhances gene transfer in vivo” Gene Ther., 6:508-514.

[0169] Encoded anti-human FcRn AFFIMER® polypeptides can be delivered by a wide range of gene delivery system commonly used for gene therapy including viral, non-viral, or physical. See, for example, Rosenberg et al., Science, 242:1575-1578, 1988, and Wolff et al., Proc. Natl. Acad. Sci. USA 86:9011-9014 (1989). Discussion of methods and compositions for use in gene therapy include Eck et al., in Goodman & Gilman's The Pharmacological Basis of Therapeutics, Ninth Edition, Hardman et al., eds., McGraw-Hill, New York, (1996), Chapter 5, pp. 77-101; Wilson, Clin. Exp. Immunol. 107 (Suppl. 1):31-32, 1997; Wivel et al., Hematology/Oncology Clinics of North America, Gene Therapy, S. L. Eck, ed., 12(3):483-501, 1998; Romano et al., Stem Cells, 18:19-39, 2000, and the references cited therein. U.S. Pat. No. 6,080,728 also provides a discussion of a wide variety of gene delivery methods and compositions. The routes of delivery include, for example, systemic administration and administration in situ.

[0170] An effective gene transfer approach should be directed to the specific tissues/cells where it is needed, and the resulting transgene expression should be at a level that is appropriate to the specific application. Promoters are a major cis-acting element within the vector genome design that can dictate the overall strength of expression as well as cell-specificity.

[0171] In some embodiments, a viral vector is used to deliver a nucleic acid encoding a anti-human FcRn AFFIMER® polypeptide of the present disclosure. Non-limiting examples of viral vectors include adenoviral vectors, adeno-associated viral (AAV) vectors, and retroviral vectors. In other embodiments, a non-viral vector is used to deliver a nucleic acid encoding a anti-human FcRn AFFIMER® polypeptide of the present disclosure. Non-limiting examples of non-viral vectors include plasmid vectors (e.g., plasmid DNA (pDNA) delivered via, e.g., hydrodynamic-based transfection or electroporation), minicircle DNA, and RNA-mediate gene transfer (e.g., delivery of messenger RNA (mRNA) encoding a anti-human FcRn AFFIMER® polypeptide of the present disclosure).

[0172] Exemplary nucleic acids or polynucleotides for the encoded anti-human FcRn AFFIMER® polypeptides of the present disclosure include, but are not limited to, ribonucleic acids (RNAs), deoxyribonucleic acids (DNAs), threose nucleic acids (TNAs), glycol nucleic acids (GNAs), peptide nucleic acids (PNAs), locked nucleic acids (LNAs, including LNA having a β-D-ribo configuration, a-LNA having an a-L-ribo

[0173] o configuration (a diastereomer of LNA), 2′-amino-LNA having a 2′-amino functionalization, and 2′-amino-a-LNA having a 2′-amino functionalization), ethylene nucleic acids (ENA), cyclohexenyl nucleic acids (CeNA) or hybrids or combinations thereof.

[0174] mRNA presents an emerging platform for antibody gene transfer that can be adapted by those skilled in the art for delivery of polynucleotide constructs encoding anti-human FcRn AFFIMER® polypeptides of the present disclosure. Although current results differ considerably, in certain instances the mRNA constructs appear to be able to rival viral vectors in terms of generated serum mAb titers. Levels were in therapeutically relevant ranges within hours after mRNA administration, a marked shift in speed compared to DNA. The use of lipid nanoparticles (LNP) for mRNA transfection, rather than the physical methods typically required for DNA, can provide significant advantages in some embodiments towards application range.

[0175] Nucleic acids encoding anti-human FcRn AFFIMER® polypeptides may be delivered by, for example, intravenously, intramuscularly, or intratumorally (e.g., by injection, electroporation or other means).

[0176] Nucleic acids encoding anti-human FcRn AFFIMER® polypeptides may be formulated, for example, in lipid nanoparticles or liposomes (e.g., cationic lipid nanoparticles or liposomes), biodegradable microsphere, or other nano- or microparticle. Other lipid-based (e.g., PEG lipid) and polymeric-based formulations and delivery vehicles are contemplated herein.

### EXAMPLES

### Example 1. AFFIMER® Selections

[0177] Process Overview

### Phage Selections

[0178] Biopanning on captured Human (HFcRn)

[0179] Solution selection on biotinylated FcRn

[0180] Two (2) rounds of selection on FcRn

[0181] Enrichment monitored by output size and polyclonal Phage ELISA

### Primary Screening

[0182] Monoclonal Crude extract ELISA against captured FcRn at pH6

### Secondary Screening

[0183] ELISA on FcRn at pH 6.0 and 7.4

### General Methods

[0184] Selection of huFcRn binding phage from the AFFIMER® library was carried out as described below using approximately 1×10¹² phage added from a library of size approximately 6×10¹⁰ diversity.

[0185] A peptide of the present disclosure, for example, a huFcRn binding component, may be identified by selection from a library of AFFIMER® polypeptides with two random loops, for example, generally but not exclusively of the same length of 9 amino acids.

[0186] As indicated above, the huFcRn binding peptides of the disclosure were identified by selection from a phage display library comprising random loop sequences nine amino acids in length displayed in a constant AFFIMER® framework backbone based upon the sequence for SQT. Such selection procedures are generally known. According to such procedures, suspensions of phage are incubated with target antigen (either biotinylated antigen captured on streptavidin beads or unbiotinylated antigen captured on a plate). Unbound phage are then washed away and, subsequently, bound phage are eluted either by incubating the antigen with low pH, high pH or trypsin. E. coli are then infected with released, pH neutralised phage or trypsin-inactivated phage and a preparation of first round phage is obtained. The cycle is performed repeatedly, for example, two or three times and, in order to enrich for targeting phage, the stringency conditions may be increased in the later rounds of selection, for example by increasing the number of wash steps, reducing the antigen concentration, and preselecting with blocked streptavidin beads or wells coated with blocking reagent.

[0187] Antigens used herein were human FcRn (BPS #71285), and biotinylated human FcRn (BPS #71283). Following selection by successive rounds of phage amplification, huFcRn binding clones were identified by a crude extract ELISA as described below.

[0188] Following phage selections, individual bacterial clones containing the phagemid vector were picked from titration plates into 96 well cell culture format. Soluble AFFIMER® in crude cell extract was prepared from lysis of bacterial cells overexpressing the AFFIMER® with a C-terminal myc tag and used in a primary screening ELISA. These AFFIMER® polypeptides in extract were screened for binding to antigen at pH 6 and later also at pH 7.4, detecting AFFIMER® bound to antigen immobilized on a plate with an HRP labelled anti-myc tag antibody (Abcam #ab1261), developing the ELISA using 1-step Ultra TMB-ELISA substrate (Thermo Scientific). The screening was also carried out against non-target or related target molecules captured on the plate (eg blocking molecule, neutravidin or b-2microglobulin (Sigma #M4890) The non-target and target binding data were compared to identify library members that specifically bind to the target.

### Example 2. huFcRn Binding ELISA Assay at pH 6

[0189] The binding of AFFIMER® to Hu-FcRn was evaluated by enzyme linked immunosorbent assay (ELISA) in 384 well plate format. Hu FcRn (BPS Bioscience) was coated at 5 μg/ml on the plate in 40 mM MES, pH 6. Plates were washed 3 times with 100 μl of washing buffer (PBS, Tween 20 0.05%, pH 6) with a plate washer and saturated with Casein 5% (Sigma) in MES pH6 for 60 minutes at room temperature (25±1° C.). Plates were washed as described previously. AFFIMER® and negative controls (mAb anti hFcRn (clone ADM31), negative controls) were then diluted in duplicate, and loaded on the plate for 90 minutes at room temperature (25±1° C.). Plates were washed 3 times as described previously. Biotinylated polyclonal antibody anti Cystatin (R&D Systems) was then diluted in dilution Buffer (1% casein, 0.05% Tween 20, and 8 mM MES. It is in pH6) and incubated 60 minutes at room temperature (25±1° C.). Plates were washed 3 times as described previously and Streptavidin HRP (N200, thermo-Fisher) was incubated for 30 minutes at room temperature (25±1° C.). Plates were washed and the substrate (TMB, Pierce Thermo-Scientific) was added in the plate for 8±1 minute. The reaction was stopped using an acidic solution and plates were read at 450-630 nm. The EC50 was then calculated using the interpolated non-linear four-parameters standard curve (Table 4).

### Example 3. huFcRn Binding ELISA Assay at pH 7.4

[0190] The binding of AFFIMER® to hu-FcRn was evaluated by enzyme linked immunosorbent assay (ELISA) in 384 well plate format. Hu FcRn (BPS Bioscience) was coated at 5 μg/ml on the plate in PBS, pH 7.4. Plates were washed 3 times with 100 μl of washing buffer (PBS, Tween 20 0.05%, pH 7.4) with a plate washer and saturated with Casein 5% (Sigma) in MES pH 7.4 for 60 minutes at room temperature (25±1° C.). Plates were washed as described previously. AFFIMER® and controls (mAb anti hFcRn (ADM31), blank) were then diluted in duplicate, and loaded on the plate for 90 minutes at room temperature (25±1° C.). Plates were washed 3 times as described previously. Biotinylated polyclonal antibody anti Cystatin (R&D Systems) was then diluted in dilution Buffer (1% casein, 0.01% Tween 20, and 8 mM MES. It is in pH 7.4) and incubated 60 minutes at room temperature (25±1° C.). Plates were washed 3 times as described previously and Streptavidin HRP (N200, thermo-Fisher) was incubated for 30 minutes at room temperature (25±1° C.). Plates were washed and the substrate (TMB, Pierce Thermo-Scientific) was added in the plate for 8±1 minute. The reaction was stopped using an acidic solution and plates were read at 450-630 nm. The EC50 was then calculated using the interpolated non-linear four-parameters standard curve, and the results are shown below in Table 4.

TABLE 4
EC₅₀ Values at pH 6 and pH 7.4

| AFFIMER ® | EC50 nM | EC50 nM |
|---|---|---|
| Clone | (pH 6) | (pH 7.4) |
| LGC01-15 | 74.09 | >500 |
| LGC01-35 | 47.92 | 225 |
| LGC01-38 | 0.14 | 0.895 |

In the present invention, LGC01 can be used interchangeably with FcRn. For example, LGC01-15 refers to FcRn-15.

### Example 4: AFFIMER® Expression and Purification

[0191] All AFFIMER® constructs expressed in E. coli have been cloned with a C-terminal hexa-HIS tag (HHHHHH (SEQ ID NO: 1185)) to simplify protein purification with immobilized metal affinity chromatography resin (IMAC resin). When required, additional peptide sequences can be added between the AFFIMER® and the HIS tag such as MYC (EQKLISEEDL (SEQ ID NO: 1186)) for detection or a TEV protease cleavage site (ENLYFQ(G/S) (SEQ ID NO: 1187)) to allow for the removal of tags. AFFIMER® analzed in FIG. 4A have MYC (EQKLISEEDL (SEQ ID NO: 1186)) and a TEV protease cleavage site (ENLYFQ(G/S) (SEQ ID NO: 1187)) and AFFIMER® analzed in FIG. 4B does not have MYC (EQKLISEEDL (SEQ ID NO: 1186)) and a TEV protease cleavage site (ENLYFQ(G/S) (SEQ ID NO: 1187)). AFFIMER® proteins were expressed from E. coli and purified using IMAC, a second stage purification to remove endotoxin, CHT (Ceramic hydroxyapatite, BioRad) type I resin or cation ion exchange (HiTrap, Cytiva) with a triton 114× wash step (Sigma), and size exclusion chromatography (SEC; Cytiva). AFFIMER® monomer purification from E. coli was performed by transforming the expression plasmid pD861 (Atum) into BL21 E. coli cells (Millipore) using the manufacturers protocol. The total transformed cell mixture was plated onto LB agar plates containing 50 μg/ml kanamycin (AppliChem) and incubated at 37° C. overnight. The following day, the lawn of transformed E. coli was transferred to a sterile flask of 1× terrific broth media (Melford) and 50 μg/ml kanamycin and incubated at 30° C. shaking at 250 rpm. Expression was induced with 10 mM rhamnose (Alfa Aesar) once the cells reached an optical density OD₆₀₀ of approximate 0.8-1.0. The culture was then incubated for a further 5 hours at 37° C. Cells were harvested by centrifuging and lysing the resulting cell pellet. AFFIMER® purification was performed using batch bind affinity purification of His-tagged protein. Specifically, nickel agarose affinity resin (Super-NiNTA500; Generon) was used. The resin was washed with NPI20 buffer (50 mM sodium phosphate, 0.5 M NaCl, 20 mM imidazole) and the bound protein was eluted with 5 column volumes (CV) of NPI400 buffer. Eluted protein was buffer exchanged for a second stage purification using CHT type I resin in running buffer 10 mM sodium phosphate pH 6.4-6.5 buffer, eluting with the addition of 2 M NaCl over a linear gradient (SEQ ID NO: 628, 631, 713 and 1184). Alternatively, a second stage purification using cation exchange was used with a SP HP ion exchange column (Cytiva) in running buffer 50 mM MES pH 6.2 for clone FcRn-125 included a 0.1% triton 114× (Sigma) wash step and the protein was eluted with a 1M NaCl linear gradient (SEQ ID NO: 718). A third stage polishing purification was performed on a preparative SEC performed using the HiLoad 26/600 Superdex 75 pg (Cytiva) run in PBS 1× buffer. Expression and purity of clones was analysed using SEC-HPLC (FIGS. 3A-3C) with an Acclaim SEC-300 column (Thermo) using a PBS 1× mobile phase. The protein yield was estimated using Nanodrop (Thermo) A280 readings and the final product was run on an SDS-PAGE Bolt Bis Tris plus 4-12% gel (Thermo)(FIG. 4A) and SDS-PAGE precast gel 20% (Komabiotech) (FIG. 4B) in Novex?20X Bolt?MES SDS running buffer (Thermo) at 200 volts, with samples heated in reducing buffer at 95° C. for 5 minutes. Protein bands on the gel were stained with Quick Commassie (Generon). PageRuler prestained protein molecular weight marker (Thermo) (FIG. 4A) and Precision Plus Protein™ Dual color standard (Bio-rad)(FIG. 4B) were run on the gel to estimate the molecular weight of the fusion proteins following the three-stage purification. Endotoxin levels of final protein batches were measured using a LAL test on an Endosafe® Nexgen MCS system (Charles River) and were between 1-0.1 EU/mg for all protein batches.

### Example 5. huFcRn Binding ELISA Assay at pH 6 for AFFIMER® Characterization

[0192] The binding of AFFIMER® to hu-FcRn was evaluated by enzyme linked immunosorbent assay (ELISA) in 384 well plate format. Hu FcRn (BPS Bioscience) was coated at 5 μg/ml on the plate in 40 mM MES, pH 6. Plates were washed 3 times with 100 ul of washing buffer (PBS, Tween 20 0.05%, pH 6) with a plate washer and saturated with Casein 5% (Sigma) in MES pH 6 for 60 minutes at room temperature (25±1° C.). Plates were washed as described previously. AFFIMER® and negative controls (mAb anti hFcRn (clone ADM31), negative controls) were then diluted in duplicate, and loaded on the plate for 90 minutes at room temperature (25±1° C.). Plates were washed 3 times as described previously. Biotinylated polyclonal antibody anti Cystatin (R&D Systems) was then diluted in dilution buffer (1% casein, 0.05% Tween 20, and 8 mM MES, pH 6) and incubated 60 minutes at room temperature (25±1° C.). Plates were washed 3 times as described previously and Streptavidin HRP (N200, Thermo-Fisher) was incubated for 30 minutes at room temperature (25±1° C.). Plates were washed and the substrate (TMB, Pierce Thermo-Scientific) was added in the plate for 8±1 minute. The reaction was stopped using an acidic solution and plates were read at 450-630 nm. The EC₅₀ was then calculated using the interpolated non-linear four-parameters standard curve (FIGS. 5A-5B and Table 5A).

[0193] In order to quantitatively compare the affinity for FcRn at pH 6.0 and pH 7.4, a slightly more optimized ELISA method was developed. After finding the optimal conditions by testing temperature and time, the binding affinity of the AFFIMER® was measured. (Table 5B).

### Example 6. huFcRn Binding ELISA Assay at pH 7.4 for AFFIMER® Characterization

[0194] The binding of AFFIMER® to hu-FcRn was evaluated by enzyme linked immunosorbent assay (ELISA) in 384 well plate format. Hu FcRn (BPS Bioscience) was coated at 5 μg/ml on the plate in PBS, pH 7.4. Plates were washed 3 times with 100 ul of washing buffer (PBS, Tween 20 0.05%, pH 7.4) with a plate washer and saturated with Casein 5% (Sigma) in MES pH 7.4 for 60 minutes at room temperature (25±1° C.). Plates were washed as described previously. AFFIMER® and controls (mAb anti hFcRn (ADM31), blank) were then diluted in duplicate, and loaded on the plate for 90 minutes at room temperature (25±1° C.). Plates were washed 3 times as described previously. Biotinylated polyclonal antibody anti Cystatin (R&D Systems) was then diluted in dilution Buffer (1% casein, 0.01% Tween 20, and 8 mM MES. It is in pH7.4) and incubated 60 minutes at room temperature (25±1° C.). Plates were washed 3 times as described previously and Streptavidin HRP (N200, thermo-Fisher) was incubated for 30 minutes at room temperature (25±1° C.). Plates were washed and the substrate (TMB, Pierce Thermo-Scientific) was added in the plate for 8±1 minute. The reaction was stopped using an acidic solution and plates were read at 450-630 nm. The EC₅₀ was then calculated using the interpolated non-linear four-parameters standard curve (FIGS. 5A-5B, Table 5A).

[0195] In order to quantitatively compare the affinity for FcRn at pH 6.0 and pH 7.4, a slightly more optimized ELISA method was developed. After finding the optimal conditions by testing temperature and time, the binding affinity of the AFFIMER® was measured. (Table 5B).

[0196] The most suitable FcRn AFFIMER® for FcRn cell recycling is advantageous if the difference in binding affinity at pH 6.0 and pH 7.4 is large, so the EC50 ratio at the measured pH 6.0 and pH 7.4 was calculated in Table 5A-B.

TABLE 5A
EC₅₀ at pH 6 and pH 7.4

| | EC50 (nM) | | pH 6/ |
|---|---|---|---|
| Clone name | pH 6 | pH 7.4 | pH 7.4 |
| FcRn-35 | 0.673 | 113.0 | 167.9049 |
| FcRn-38 | 0.003 | 0.5 | 166.6667 |
| FcRn-120 | 50.5 | NA | — |
| FcRn-125 | 187.2 | NA | — |
| AVA04-251 FX6 | 0.03 | 4.3 | 143.3333 |

TABLE 5B
EC₅₀ at pH 6 and pH 7.4

| | EC50 (nM) | | pH 6/ |
|---|---|---|---|
| Clone name | pH 6 | pH 7.4 | pH 7.4 |
| FcRn-12 | 262 | 15700 | 59.92 |
| FcRn-16 | 1020 | 48600 | 47.65 |
| FcRn-18 | 327 | 19700 | 60.24 |
| FcRn-48 | 1500 | 79900 | 53.27 |
| FcRn-88 | 967 | 23300 | 24.1 |
| FcRn-109 | 570 | 15700 | 27.54 |
| FcRn-176 | 4480 | 78900 | 17.61 |

### Example 7. BLI-Based FcRn AFFIMER® Screening

[0197] A BLI (Bio-Layer Interferometry)-based binding assay was performed for AFFIMER® screening in which the affinity to FcRn varies depending on the pH. hFcRn with a His-tag was fixed to a Ni-NTA biosensor. Thereafter, in the hFcRn and the AFFIMER® candidate group, Ni²⁺ not bound to the hFcRn was blocked using His-SQT-gly with a high concentration, in which reactivity is absent. Then, the AFFIMER® candidate group diluted to the same concentration was reacted with the hFcRn. All affimers were analyzed at pH 6.0 and pH 7.4, and K_{D} was determined with a 1:1 binding model. The results of Octet Kinetic Assay at pH 6.0 and 7.4 are shown in Table 6 below.

TABLE 6
Binding Affinity (K_{D}) at pH 6 and pH 7.4

| | Octet Kinetic Assay | | | | |
|---|---|---|---|---|---|
| | 40 nM, pH 6.0 | | 40 nM, pH 7.4 | | |
| | K_{D} | | K_{D} | | pH 7.4/ |
| Affimer | (nM) | Response | (nM) | Response | pH 6.0 |
| FcRn-12 | 28.4 | 0.836 | 123 | 0.5815 | 4.3 |
| FcRn-16 | 20.5 | 1.0713 | 83.3 | 0.6309 | 4.1 |
| FcRn-18 | 16 | 1.2006 | 65 | 0.7937 | 4.1 |
| FcRn-48 | 8.76 | 1.4376 | 59.3 | 0.8034 | 6.8 |
| FcRn-88 | 18.7 | 1.1172 | 82.8 | 0.7102 | 4.4 |
| FcRn-109 | 9.27 | 1.1567 | 61.2 | 0.6019 | 6.6 |
| FcRn-176 | 10.5 | 1.0154 | 57.9 | 0.5954 | 5.5 |

### Example 8. FcRn Competition ELISA

[0198] To evaluate if the AFFIMER® was competiting with IgG1, a competitive ELISA (huIgGl/huFcRn) was performed. Briefly, huIgG1 isotype control (BioXcell) was coated overnight on the plate at 5 μg/ml in 40 mM MES, pH 6. Then plates were saturated using 40 mM MES+5% casein, pH 6. In the meantime, huFcRn (His tagged molecule, BPS) was pre-incubated with a dilution of FcRn Binding AFFIMER® and its control (human IgG1 and HuSA. After saturation, plates were washed in PBS, 0.05% Tween at pH 6, the mix was added to the plates and incubated for minimum an hour. Plates were then washed as previously and the detection monoclonal antibody, anti-B2M HRP (Biolegend), was added and incubated for minimum 1 hour. After a final wash, development of the reaction was performed using TMB (Pierce) and the plates were read using a plate reader at 450 nm and absorbance were plotted against log of AFFIMER® and control concentration using a four-parameter fit. FIG. 6 shows FcRn binding AFFIMER® do not compete with huIgGl.

### Example 9. FcRn Cell Binding Protocol

[0199] 1 μL of 100 μM AFFIMER® was placed in a 96-well V-bottom Plate, and 200 μL of CHO-Kl-FcRn, which was resuspended with washing buffer (PBS pH 6.0 or pH 7.4+2% FBS) at a concentration of 1×10⁶ cells/mL, was added thereto to react at room temperature for 20 min. 200 μL of washing buffer was added, and the resultants were centrifuged at 4° C. at 1,000 rpm for 3 min to remove the supernatant (3 times). Anti Cystatin Monoclonal Ab (Novus, NBP2-79882AF488), which is conjugated with AF488, was diluted with washing buffer to add 0.2 μL of the Anti Cystatin Monoclonal Ab per 2×10⁵ cells, and then the reaction was performed at 4° C. for 1 h. 200 μL of washing buffer was added, and the resultants were centrifuged at 4° C. at 1,000 rpm for 3 min to remove the supernatant (3 times). The resultants were resuspended with 200 μL of washing buffer, and the value was measured using Flow Cytometry.

[0200] In FIG. 7 and FIG. 8, Affimer's cell binding using hFcRn over-expression CHO single clone cell line (pH6.0 & pH7.4) was confirmed.

### Example 10. Screening of Lead FcRn Binding AFFIMER® Polypeptides for Receptor Mediated Recycling in a Human Endothelial Cell-Based Recycling Assay

[0201] 7.5×10⁵ endothelial cell line (HMEC1) stably expressing HA-hFcRn-EGFP were seeded into 24-well plates per well (Costar) and cultured for 2 days in growth medium. The cells were washed twice and starved for 1 hour in Hank's balanced salt solution (HBSS) (ThermoFisher). Then, 800 nM of either hIgG1 or AFFIMER® polypeptides were diluted in 125 μl HBSS (pH 7.4) and added to the cells followed by 4 h incubation. The media was removed and the cells were washed four times with ice cold HBSS (pH 7.4), before fresh warm HBSS (pH 7.4) or growth medium without FCS and supplemented with MEM non-essential amino acids (ThermoFisher) was added. The cells were incubated for 4 hours before sample were collected. The wells with uptake samples and residual amounts were then lysed prior to collection. Total protein lysates were obtained using RIPA lysis buffer (ThermoFisher) supplied with complete protease inhibitor tablets (Roche). The mixture was incubated (220 ul) with the cells on ice and a shaker for 10 min followed by centrifugation for 15 min at 10,000×g to remove cellular debris. Rescued AFFIMER® polypeptides and controls were quantified by quantitative ELISA anti-cystatin (see Example 11) or anti-human IgG (FIG. 9).

### Example 11. AFFIMER® Quantification by ELISA Following HERA Assay

[0202] 96-well plates (Corning Costar, 3590) were coated with 50 ul of 1 ug/ml of Anti-His MAB050 diluted in coating buffer (Carbonate/bicarbonate) for 16 hours (+/−2h) at 4° C. The plates were further washed 2× with 150 ul wash buffer (1×PBS+0.05% Tween) and blocked with 100 ul 1×PBS+5% casein blocking buffer for 90 min (+/−15 min) at room temperature (RT). Next, the HERA samples were added to the plates, diluted 1:1 in 6 steps in dilution buffer (PBS+1% casein+0.01% Tween) and matching AFFIMER® polypeptides were used as standard for each variant (3.5 nM-0.0017 nM). The HERA samples were incubated for 90 min (+/−15 min) at RT. Plates were washed 3× with wash buffer. Binding was detected by using 0.05 mg/ml BAF1470 1:1000 and 1 mg/ml poly streptavidin-HRP 1:5000. The two antibodies were pre-incubated in a small volume for 20 min, before diluted in dilution buffer and added to the plates in 50 ul volume and incubated for 90 min (+/−15 min) at RT. Plates were washed 3× and binding was visualized by adding 50 ul of RT TMB to each well. The reaction was stopped by adding 50 ul 1M HCl (after 20-30 min). Absorbance was read at 450 nm and 620 nm. Control IgG1 was quantified using similar protocol using a goat polyclonal anti human Fc for capture and an alkaline phosphatase conjugated polyclonal antibody anti huIgGFc for detection.

[0203] All references, patents and patent applications disclosed herein are incorporated by reference with respect to the subject matter for which each is cited, which in some cases may encompass the entirety of the document.

[0204] The indefinite articles “a” and “an” as used herein in the specification and in the claims, unless clearly indicated to the contrary, should be understood to mean “at least one.”

[0205] It should also be understood that, unless clearly indicated to the contrary, in any methods claimed herein that include more than one step or act, the order of the steps or acts of the method is not necessarily limited to the order in which the steps or acts of the method are recited.

[0206] In the claims, as well as in the specification above, all transitional phrases such as “comprising,” “including,” “carrying,” “having,” “containing,” “involving,” “holding,” “composed of,” and the like are to be understood to be open-ended, i.e., to mean including but not limited to. Only the transitional phrases “consisting of” and “consisting essentially of” shall be closed or semi-closed transitional phrases, respectively, as set forth in the United States Patent Office Manual of Patent Examining Procedures, Section 2111.03.

[0207] The terms “about” and “substantially” preceding a numerical value mean±10% of the recited numerical value.

[0208] Where a range of values is provided, each value between and including the upper and lower ends of the range are specifically contemplated and described herein.

The application's sequence listing, which the Patent Office published only in electronic form, follows.

SEQUENCE LISTING (1187 sequences)

SEQ ID NO: 1 - protein, 49 aa, Artificial Sequence
  Synthetic
MIPGGLSEAKPATPEIQEIVDKVKPQLEEKTNETYGKLEAVQYKTQVLA

SEQ ID NO: 2 - protein, 24 aa, Artificial Sequence
  Synthetic
GTNYYIKVRAGDNKYMHLKVFKSL

SEQ ID NO: 3 - protein, 21 aa, Artificial Sequence
  Synthetic
EDLVLTGYQVDKNKDDELTGF

SEQ ID NO: 4 - protein, 9 aa, Artificial Sequence
  Synthetic
  MISC_FEATURE (1)..(1): Xaa can be any naturally occurring amino acid
  SITE (2)..(5): In some embodiments, at least two Xaas may be selected from His, Lys or Arg
  SITE (2)..(7): In some embodiments, three or four Xaas may be selected from His, Lys or Arg
  SITE (4)..(5): In some embodiments, at least two Xaas may be selected from His, Lys or Arg
  MISC_FEATURE (8)..(9): Xaa can be any naturally occurring amino acid
XXXXXXXXX

SEQ ID NO: 5 - protein, 9 aa, Artificial Sequence
  Synthetic
  MISC_FEATURE (1)..(1): Xaa can be any naturally occurring amino acid
  SITE (2)..(8): At least three Xaas are selected from His, Lys or Arg and at least an additional two Xaas are selected  from His, Lys, Arg, Phe, Tyr or Trp.
  MISC_FEATURE (9)..(9): Xaa can be any naturally occurring amino acid
XXXXXXXXX

SEQ ID NO: 6 - protein, 9 aa, Artificial Sequence
  Synthetic
HVIDHKYRH

SEQ ID NO: 7 - protein, 9 aa, Artificial Sequence
  Synthetic
LKGHKHHKT

SEQ ID NO: 8 - protein, 9 aa, Artificial Sequence
  Synthetic
HNHHKYPHG

SEQ ID NO: 9 - protein, 9 aa, Artificial Sequence
  Synthetic
VHKKHHKWF

SEQ ID NO: 10 - protein, 9 aa, Artificial Sequence
  Synthetic
KRHADHPRV

SEQ ID NO: 11 - protein, 9 aa, Artificial Sequence
  Synthetic
QQPKQHGFH

SEQ ID NO: 12 - protein, 9 aa, Artificial Sequence
  Synthetic
HHGHRTHSV

SEQ ID NO: 13 - protein, 9 aa, Artificial Sequence
  Synthetic
KQHHWDVHR

SEQ ID NO: 14 - protein, 9 aa, Artificial Sequence
  Synthetic
GGQPAKQHF

SEQ ID NO: 15 - protein, 9 aa, Artificial Sequence
  Synthetic
NHVRWKDHD

SEQ ID NO: 16 - protein, 9 aa, Artificial Sequence
  Synthetic
HSHHPEHWY

SEQ ID NO: 17 - protein, 9 aa, Artificial Sequence
  Synthetic
KVKTHDHQR

SEQ ID NO: 18 - protein, 9 aa, Artificial Sequence
  Synthetic
YREVSKRRT

SEQ ID NO: 19 - protein, 9 aa, Artificial Sequence
  Synthetic
VTKRAWLKI

SEQ ID NO: 20 - protein, 9 aa, Artificial Sequence
  Synthetic
HNHRHYSKG

SEQ ID NO: 21 - protein, 9 aa, Artificial Sequence
  Synthetic
KHHHHKHQH

SEQ ID NO: 22 - protein, 9 aa, Artificial Sequence
  Synthetic
HPHHVRSSV

SEQ ID NO: 23 - protein, 9 aa, Artificial Sequence
  Synthetic
ETPHERHKT

SEQ ID NO: 24 - protein, 9 aa, Artificial Sequence
  Synthetic
GTIQHVNQH

SEQ ID NO: 25 - protein, 9 aa, Artificial Sequence
  Synthetic
YNVGRKKHR

SEQ ID NO: 26 - protein, 9 aa, Artificial Sequence
  Synthetic
RRGPQKSSY

SEQ ID NO: 27 - protein, 9 aa, Artificial Sequence
  Synthetic
HDRHQKHWR

SEQ ID NO: 28 - protein, 9 aa, Artificial Sequence
  Synthetic
IPHHHKPRV

SEQ ID NO: 29 - protein, 9 aa, Artificial Sequence
  Synthetic
KGKHYHSQQ

SEQ ID NO: 30 - protein, 9 aa, Artificial Sequence
  Synthetic
HKHKHHHTN

SEQ ID NO: 31 - protein, 9 aa, Artificial Sequence
  Synthetic
GRHKHIQVH

SEQ ID NO: 32 - protein, 9 aa, Artificial Sequence
  Synthetic
PHQHKLHAH

SEQ ID NO: 33 - protein, 9 aa, Artificial Sequence
  Synthetic
RRDHVWHKG

SEQ ID NO: 34 - protein, 9 aa, Artificial Sequence
  Synthetic
SHRSHADRR

SEQ ID NO: 35 - protein, 9 aa, Artificial Sequence
  Synthetic
SSQNGYQGH

SEQ ID NO: 36 - protein, 9 aa, Artificial Sequence
  Synthetic
TEGGKKLRR

SEQ ID NO: 37 - protein, 9 aa, Artificial Sequence
  Synthetic
KARHHQGHA

SEQ ID NO: 38 - protein, 9 aa, Artificial Sequence
  Synthetic
NHSQGRHHI

SEQ ID NO: 39 - protein, 9 aa, Artificial Sequence
  Synthetic
KYWKADWYW

SEQ ID NO: 40 - protein, 9 aa, Artificial Sequence
  Synthetic
HRQYPPGPH

SEQ ID NO: 41 - protein, 9 aa, Artificial Sequence
  Synthetic
RQHHHFYRT

SEQ ID NO: 42 - protein, 9 aa, Artificial Sequence
  Synthetic
PQQHQPDPT

SEQ ID NO: 43 - protein, 9 aa, Artificial Sequence
  Synthetic
LSFNNYHWH

SEQ ID NO: 44 - protein, 9 aa, Artificial Sequence
  Synthetic
HHSKHHHLH

SEQ ID NO: 45 - protein, 9 aa, Artificial Sequence
  Synthetic
HKYDRHSFK

SEQ ID NO: 46 - protein, 10 aa, Artificial Sequence
  Synthetic
KHSRHHHAQY

SEQ ID NO: 47 - protein, 9 aa, Artificial Sequence
  Synthetic
RHHHSHFHL

SEQ ID NO: 48 - protein, 9 aa, Artificial Sequence
  Synthetic
RNHRHPHGQ

SEQ ID NO: 49 - protein, 10 aa, Artificial Sequence
  Synthetic
GHVEQVHFPY

SEQ ID NO: 50 - protein, 9 aa, Artificial Sequence
  Synthetic
EPHKHHYHL

SEQ ID NO: 51 - protein, 9 aa, Artificial Sequence
  Synthetic
WKKHNWKYK

SEQ ID NO: 52 - protein, 9 aa, Artificial Sequence
  Synthetic
IHHHTWGLK

SEQ ID NO: 53 - protein, 9 aa, Artificial Sequence
  Synthetic
KPKYHHHDI

SEQ ID NO: 54 - protein, 9 aa, Artificial Sequence
  Synthetic
QYWHSHETW

SEQ ID NO: 55 - protein, 9 aa, Artificial Sequence
  Synthetic
RKQYHLPWT

SEQ ID NO: 56 - protein, 9 aa, Artificial Sequence
  Synthetic
AIHWAHYIL

SEQ ID NO: 57 - protein, 8 aa, Artificial Sequence
  Synthetic
DWRKLTLF

SEQ ID NO: 58 - protein, 9 aa, Artificial Sequence
  Synthetic
TKSHKFAYH

SEQ ID NO: 59 - protein, 9 aa, Artificial Sequence
  Synthetic
SKYVHWHKF

SEQ ID NO: 60 - protein, 9 aa, Artificial Sequence
  Synthetic
KEQAAWVLH

SEQ ID NO: 61 - protein, 9 aa, Artificial Sequence
  Synthetic
HLQAPRNAY

SEQ ID NO: 62 - protein, 9 aa, Artificial Sequence
  Synthetic
GLTHRWRPH

SEQ ID NO: 63 - protein, 9 aa, Artificial Sequence
  Synthetic
SHHRATDQV

SEQ ID NO: 64 - protein, 9 aa, Artificial Sequence
  Synthetic
NKWHIRFAT

SEQ ID NO: 65 - protein, 9 aa, Artificial Sequence
  Synthetic
HIRDSLWIT

SEQ ID NO: 66 - protein, 9 aa, Artificial Sequence
  Synthetic
YHISLSFRE

SEQ ID NO: 67 - protein, 9 aa, Artificial Sequence
  Synthetic
IHWAGFFRG

SEQ ID NO: 68 - protein, 9 aa, Artificial Sequence
  Synthetic
YYSERHFYK

SEQ ID NO: 69 - protein, 9 aa, Artificial Sequence
  Synthetic
RQQQVHVPS

SEQ ID NO: 70 - protein, 9 aa, Artificial Sequence
  Synthetic
TKKNQLQGH

SEQ ID NO: 71 - protein, 9 aa, Artificial Sequence
  Synthetic
RDIHHHHHW

SEQ ID NO: 72 - protein, 9 aa, Artificial Sequence
  Synthetic
QRQYTTKVL

SEQ ID NO: 73 - protein, 9 aa, Artificial Sequence
  Synthetic
YWDWRFVEW

SEQ ID NO: 74 - protein, 9 aa, Artificial Sequence
  Synthetic
GFSKPFKWY

SEQ ID NO: 75 - protein, 9 aa, Artificial Sequence
  Synthetic
IFQERLAGQ

SEQ ID NO: 76 - protein, 9 aa, Artificial Sequence
  Synthetic
KYDHHTQSL

SEQ ID NO: 77 - protein, 9 aa, Artificial Sequence
  Synthetic
KHAHTPFGP

SEQ ID NO: 78 - protein, 9 aa, Artificial Sequence
  Synthetic
SLSRWLWAE

SEQ ID NO: 79 - protein, 9 aa, Artificial Sequence
  Synthetic
HQQHTQRYR

SEQ ID NO: 80 - protein, 9 aa, Artificial Sequence
  Synthetic
HTISQHVST

SEQ ID NO: 81 - protein, 9 aa, Artificial Sequence
  Synthetic
DQWTWAHSR

SEQ ID NO: 82 - protein, 9 aa, Artificial Sequence
  Synthetic
WYRVWRWVW

SEQ ID NO: 83 - protein, 9 aa, Artificial Sequence
  Synthetic
QKGSTHHNH

SEQ ID NO: 84 - protein, 9 aa, Artificial Sequence
  Synthetic
PEGRAGEPS

SEQ ID NO: 85 - protein, 9 aa, Artificial Sequence
  Synthetic
HTRHHVTLW

SEQ ID NO: 86 - protein, 9 aa, Artificial Sequence
  Synthetic
QRYYKHEYR

SEQ ID NO: 87 - protein, 9 aa, Artificial Sequence
  Synthetic
QWFHRREVK

SEQ ID NO: 88 - protein, 9 aa, Artificial Sequence
  Synthetic
HHLHATQPP

SEQ ID NO: 89 - protein, 9 aa, Artificial Sequence
  Synthetic
KHWHQPVAK

SEQ ID NO: 90 - protein, 9 aa, Artificial Sequence
  Synthetic
YTTSHWTIG

SEQ ID NO: 91 - protein, 9 aa, Artificial Sequence
  Synthetic
EHHHTQLSN

SEQ ID NO: 92 - protein, 9 aa, Artificial Sequence
  Synthetic
HKPHNSKQI

SEQ ID NO: 93 - protein, 9 aa, Artificial Sequence
  Synthetic
HHTKHHSRW

SEQ ID NO: 94 - protein, 9 aa, Artificial Sequence
  Synthetic
FHRHHPIWH

SEQ ID NO: 95 - protein, 9 aa, Artificial Sequence
  Synthetic
ARVTIDWKA

SEQ ID NO: 96 - protein, 9 aa, Artificial Sequence
  Synthetic
KLEQRRSHY

SEQ ID NO: 97 - protein, 9 aa, Artificial Sequence
  Synthetic
NIHHVHHQQ

SEQ ID NO: 98 - protein, 9 aa, Artificial Sequence
  Synthetic
SHHTIAWYV

SEQ ID NO: 99 - protein, 9 aa, Artificial Sequence
  Synthetic
HHQPYYGWQ

SEQ ID NO: 100 - protein, 9 aa, Artificial Sequence
  Synthetic
VHRSHHPIK

SEQ ID NO: 101 - protein, 9 aa, Artificial Sequence
  Synthetic
WWSQRVKLF

SEQ ID NO: 102 - protein, 9 aa, Artificial Sequence
  Synthetic
HYWKPHDIH

SEQ ID NO: 103 - protein, 9 aa, Artificial Sequence
  Synthetic
TNQPRLYHQ

SEQ ID NO: 104 - protein, 9 aa, Artificial Sequence
  Synthetic
WSGKLLKHP

SEQ ID NO: 105 - protein, 9 aa, Artificial Sequence
  Synthetic
HRTSWDHKN

SEQ ID NO: 106 - protein, 10 aa, Artificial Sequence
  Synthetic
PHKQKRHFFN

SEQ ID NO: 107 - protein, 9 aa, Artificial Sequence
  Synthetic
HDQHKHDFK

SEQ ID NO: 108 - protein, 9 aa, Artificial Sequence
  Synthetic
NRVVHHFHH

SEQ ID NO: 109 - protein, 9 aa, Artificial Sequence
  Synthetic
WHKAIRQQF

SEQ ID NO: 110 - protein, 9 aa, Artificial Sequence
  Synthetic
TKEWHQHIK

SEQ ID NO: 111 - protein, 9 aa, Artificial Sequence
  Synthetic
WYHTHFANA

SEQ ID NO: 112 - protein, 9 aa, Artificial Sequence
  Synthetic
TRVHNLSVL

SEQ ID NO: 113 - protein, 9 aa, Artificial Sequence
  Synthetic
WNQPYWTTY

SEQ ID NO: 114 - protein, 9 aa, Artificial Sequence
  Synthetic
RPHNRDSHR

SEQ ID NO: 115 - protein, 9 aa, Artificial Sequence
  Synthetic
GHPRHHWKY

SEQ ID NO: 116 - protein, 9 aa, Artificial Sequence
  Synthetic
YPGHHHARD

SEQ ID NO: 117 - protein, 9 aa, Artificial Sequence
  Synthetic
IAKHHTWHQ

SEQ ID NO: 118 - protein, 9 aa, Artificial Sequence
  Synthetic
HNHGHWHFR

SEQ ID NO: 119 - protein, 9 aa, Artificial Sequence
  Synthetic
KKFDHYHQK

SEQ ID NO: 120 - protein, 9 aa, Artificial Sequence
  Synthetic
SKAHRVEHK

SEQ ID NO: 121 - protein, 9 aa, Artificial Sequence
  Synthetic
PKKHYHHGI

SEQ ID NO: 122 - protein, 9 aa, Artificial Sequence
  Synthetic
NSHRIQHGF

SEQ ID NO: 123 - protein, 9 aa, Artificial Sequence
  Synthetic
PHHSHHRLE

SEQ ID NO: 124 - protein, 9 aa, Artificial Sequence
  Synthetic
HVHHHREKG

SEQ ID NO: 125 - protein, 9 aa, Artificial Sequence
  Synthetic
KHKYHHTGH

SEQ ID NO: 126 - protein, 9 aa, Artificial Sequence
  Synthetic
KYFAPHAPH

SEQ ID NO: 127 - protein, 9 aa, Artificial Sequence
  Synthetic
LHHRAHKHL

SEQ ID NO: 128 - protein, 9 aa, Artificial Sequence
  Synthetic
AHHGHYGRA

SEQ ID NO: 129 - protein, 9 aa, Artificial Sequence
  Synthetic
PEHYSLFKP

SEQ ID NO: 130 - protein, 9 aa, Artificial Sequence
  Synthetic
DHRPRHPKH

SEQ ID NO: 131 - protein, 9 aa, Artificial Sequence
  Synthetic
KHEVHHHGN

SEQ ID NO: 132 - protein, 9 aa, Artificial Sequence
  Synthetic
KSHHHKHRE

SEQ ID NO: 133 - protein, 9 aa, Artificial Sequence
  Synthetic
HRHHTHKWT

SEQ ID NO: 134 - protein, 9 aa, Artificial Sequence
  Synthetic
GKHPHHHQN

SEQ ID NO: 135 - protein, 9 aa, Artificial Sequence
  Synthetic
WHKHHLRYR

SEQ ID NO: 136 - protein, 9 aa, Artificial Sequence
  Synthetic
KTHKEYHHS

SEQ ID NO: 137 - protein, 9 aa, Artificial Sequence
  Synthetic
RRHHHQHWS

SEQ ID NO: 138 - protein, 9 aa, Artificial Sequence
  Synthetic
THRWHQGSR

SEQ ID NO: 139 - protein, 9 aa, Artificial Sequence
  Synthetic
KRGHHHPNH

SEQ ID NO: 140 - protein, 9 aa, Artificial Sequence
  Synthetic
HTVPLRKHQ

SEQ ID NO: 141 - protein, 9 aa, Artificial Sequence
  Synthetic
TYRWGHHFH

SEQ ID NO: 142 - protein, 9 aa, Artificial Sequence
  Synthetic
FKHHDRGTH

SEQ ID NO: 143 - protein, 9 aa, Artificial Sequence
  Synthetic
TAKKHPKSH

SEQ ID NO: 144 - protein, 9 aa, Artificial Sequence
  Synthetic
HYHFSKHHN

SEQ ID NO: 145 - protein, 9 aa, Artificial Sequence
  Synthetic
YKHKHGKWR

SEQ ID NO: 146 - protein, 9 aa, Artificial Sequence
  Synthetic
VHHKPHKTE

SEQ ID NO: 147 - protein, 9 aa, Artificial Sequence
  Synthetic
HGQRYHNKS

SEQ ID NO: 148 - protein, 9 aa, Artificial Sequence
  Synthetic
HKHHRHVPS

SEQ ID NO: 149 - protein, 9 aa, Artificial Sequence
  Synthetic
HRKHSWSRH

SEQ ID NO: 150 - protein, 9 aa, Artificial Sequence
  Synthetic
NRHYHQEYK

SEQ ID NO: 151 - protein, 9 aa, Artificial Sequence
  Synthetic
KIKHHHSFK

SEQ ID NO: 152 - protein, 9 aa, Artificial Sequence
  Synthetic
QHKRSHRQS

SEQ ID NO: 153 - protein, 7 aa, Artificial Sequence
  Synthetic
SVYKWKA

SEQ ID NO: 154 - protein, 9 aa, Artificial Sequence
  Synthetic
RKLERTKYH

SEQ ID NO: 155 - protein, 9 aa, Artificial Sequence
  Synthetic
TGHKHQFHQ

SEQ ID NO: 156 - protein, 9 aa, Artificial Sequence
  Synthetic
WQELGHRVY

SEQ ID NO: 157 - protein, 9 aa, Artificial Sequence
  Synthetic
HPHHTDQRH

SEQ ID NO: 158 - protein, 9 aa, Artificial Sequence
  Synthetic
FHNHGHPHL

SEQ ID NO: 159 - protein, 9 aa, Artificial Sequence
  Synthetic
WNHHHRNKQ

SEQ ID NO: 160 - protein, 9 aa, Artificial Sequence
  Synthetic
TRHGHRHYR

SEQ ID NO: 161 - protein, 9 aa, Artificial Sequence
  Synthetic
PHHRWHRQH

SEQ ID NO: 162 - protein, 9 aa, Artificial Sequence
  Synthetic
NLRHQTEHR

SEQ ID NO: 163 - protein, 9 aa, Artificial Sequence
  Synthetic
GHRKHTHLL

SEQ ID NO: 164 - protein, 9 aa, Artificial Sequence
  Synthetic
RHSKPQHWP

SEQ ID NO: 165 - protein, 9 aa, Artificial Sequence
  Synthetic
PHRSRFHKQ

SEQ ID NO: 166 - protein, 9 aa, Artificial Sequence
  Synthetic
QRKHFHWDH

SEQ ID NO: 167 - protein, 9 aa, Artificial Sequence
  Synthetic
NKHHGQQHN

SEQ ID NO: 168 - protein, 9 aa, Artificial Sequence
  Synthetic
KYHHKYKSY

SEQ ID NO: 169 - protein, 9 aa, Artificial Sequence
  Synthetic
REWHHQTYY

SEQ ID NO: 170 - protein, 9 aa, Artificial Sequence
  Synthetic
RHYHDHHYR

SEQ ID NO: 171 - protein, 9 aa, Artificial Sequence
  Synthetic
SHTYRHSTG

SEQ ID NO: 172 - protein, 9 aa, Artificial Sequence
  Synthetic
NHRHHHPHF

SEQ ID NO: 173 - protein, 9 aa, Artificial Sequence
  Synthetic
HAKTRHHEH

SEQ ID NO: 174 - protein, 9 aa, Artificial Sequence
  Synthetic
EPHQKHKRH

SEQ ID NO: 175 - protein, 9 aa, Artificial Sequence
  Synthetic
DRRHQHGRH

SEQ ID NO: 176 - protein, 9 aa, Artificial Sequence
  Synthetic
HQHRHNLQQ

SEQ ID NO: 177 - protein, 9 aa, Artificial Sequence
  Synthetic
KRIHTWHTD

SEQ ID NO: 178 - protein, 9 aa, Artificial Sequence
  Synthetic
YHHQPRYQQ

SEQ ID NO: 179 - protein, 9 aa, Artificial Sequence
  Synthetic
GIGRHRRRR

SEQ ID NO: 180 - protein, 9 aa, Artificial Sequence
  Synthetic
DQHKQHYHF

SEQ ID NO: 181 - protein, 9 aa, Artificial Sequence
  Synthetic
GRHHESHKS

SEQ ID NO: 182 - protein, 9 aa, Artificial Sequence
  Synthetic
KRHHHWHYS

SEQ ID NO: 183 - protein, 9 aa, Artificial Sequence
  Synthetic
NRKGGHRYH

SEQ ID NO: 184 - protein, 9 aa, Artificial Sequence
  Synthetic
RKWHGHWHR

SEQ ID NO: 185 - protein, 9 aa, Artificial Sequence
  Synthetic
NWKRHHYHR

SEQ ID NO: 186 - protein, 9 aa, Artificial Sequence
  Synthetic
TRHHHRNRF

SEQ ID NO: 187 - protein, 9 aa, Artificial Sequence
  Synthetic
VKWDFKHFY

SEQ ID NO: 188 - protein, 9 aa, Artificial Sequence
  Synthetic
SDDLSPVKW

SEQ ID NO: 189 - protein, 9 aa, Artificial Sequence
  Synthetic
RHRQKWPIH

SEQ ID NO: 190 - protein, 8 aa, Artificial Sequence
  Synthetic
DRHAYHRH

SEQ ID NO: 191 - protein, 9 aa, Artificial Sequence
  Synthetic
HRHHQKHAF

SEQ ID NO: 192 - protein, 9 aa, Artificial Sequence
  Synthetic
QKGKHHDYR

SEQ ID NO: 193 - protein, 9 aa, Artificial Sequence
  Synthetic
WNKHFYKQG

SEQ ID NO: 194 - protein, 9 aa, Artificial Sequence
  Synthetic
KRRHNREFV

SEQ ID NO: 195 - protein, 9 aa, Artificial Sequence
  Synthetic
TRHVRHWTH

SEQ ID NO: 196 - protein, 9 aa, Artificial Sequence
  Synthetic
NRKWQQNHH

SEQ ID NO: 197 - protein, 9 aa, Artificial Sequence
  Synthetic
RHREKHQPY

SEQ ID NO: 198 - protein, 9 aa, Artificial Sequence
  Synthetic
YHKHNSKHS

SEQ ID NO: 199 - protein, 9 aa, Artificial Sequence
  Synthetic
PAGQHKRKH

SEQ ID NO: 200 - protein, 9 aa, Artificial Sequence
  Synthetic
DRHKYPVRV

SEQ ID NO: 201 - protein, 9 aa, Artificial Sequence
  Synthetic
GNNNPQGHV

SEQ ID NO: 202 - protein, 9 aa, Artificial Sequence
  Synthetic
KQLHHHHYK

SEQ ID NO: 203 - protein, 9 aa, Artificial Sequence
  Synthetic
QKHNWHRWH

SEQ ID NO: 204 - protein, 9 aa, Artificial Sequence
  Synthetic
YKHLGYWQK

SEQ ID NO: 205 - protein, 9 aa, Artificial Sequence
  Synthetic
HQKNFEAWE

SEQ ID NO: 206 - protein, 9 aa, Artificial Sequence
  Synthetic
ERVRRRHPP

SEQ ID NO: 207 - protein, 9 aa, Artificial Sequence
  Synthetic
HKVHIFREP

SEQ ID NO: 208 - protein, 9 aa, Artificial Sequence
  Synthetic
VKSFHVHSH

SEQ ID NO: 209 - protein, 9 aa, Artificial Sequence
  Synthetic
WHKDPPPPW

SEQ ID NO: 210 - protein, 9 aa, Artificial Sequence
  Synthetic
HRYAHNHFL

SEQ ID NO: 211 - protein, 9 aa, Artificial Sequence
  Synthetic
VSHALKTHT

SEQ ID NO: 212 - protein, 9 aa, Artificial Sequence
  Synthetic
HQSRAIYVY

SEQ ID NO: 213 - protein, 9 aa, Artificial Sequence
  Synthetic
HHTTYHQHH

SEQ ID NO: 214 - protein, 9 aa, Artificial Sequence
  Synthetic
TWWRNVQHH

SEQ ID NO: 215 - protein, 9 aa, Artificial Sequence
  Synthetic
WNKHNYQHQ

SEQ ID NO: 216 - protein, 9 aa, Artificial Sequence
  Synthetic
QHTLRVHTV

SEQ ID NO: 217 - protein, 9 aa, Artificial Sequence
  Synthetic
NQHFHQAGH

SEQ ID NO: 218 - protein, 9 aa, Artificial Sequence
  Synthetic
RQWTDRVWV

SEQ ID NO: 219 - protein, 9 aa, Artificial Sequence
  Synthetic
DHDYFHHNK

SEQ ID NO: 220 - protein, 9 aa, Artificial Sequence
  Synthetic
YWDVGPGFN

SEQ ID NO: 221 - protein, 9 aa, Artificial Sequence
  Synthetic
GIHGHHEYY

SEQ ID NO: 222 - protein, 9 aa, Artificial Sequence
  Synthetic
WQRSRYGKY

SEQ ID NO: 223 - protein, 9 aa, Artificial Sequence
  Synthetic
YHQQHWRVH

SEQ ID NO: 224 - protein, 9 aa, Artificial Sequence
  Synthetic
ATRNSYPRH

SEQ ID NO: 225 - protein, 9 aa, Artificial Sequence
  Synthetic
EHHHAHWAT

SEQ ID NO: 226 - protein, 9 aa, Artificial Sequence
  Synthetic
KQHQRSFII

SEQ ID NO: 227 - protein, 9 aa, Artificial Sequence
  Synthetic
QFWGHRVEH

SEQ ID NO: 228 - protein, 9 aa, Artificial Sequence
  Synthetic
FPSSHRTSY

SEQ ID NO: 229 - protein, 9 aa, Artificial Sequence
  Synthetic
SSKYIDHRQ

SEQ ID NO: 230 - protein, 9 aa, Artificial Sequence
  Synthetic
YWRHEHSSP

SEQ ID NO: 231 - protein, 9 aa, Artificial Sequence
  Synthetic
ERAHYDHHY

SEQ ID NO: 232 - protein, 9 aa, Artificial Sequence
  Synthetic
WRHKAYIYG

SEQ ID NO: 233 - protein, 9 aa, Artificial Sequence
  Synthetic
PQIKEQYNG

SEQ ID NO: 234 - protein, 9 aa, Artificial Sequence
  Synthetic
FKKVARDHW

SEQ ID NO: 235 - protein, 9 aa, Artificial Sequence
  Synthetic
AQKHHWHKT

SEQ ID NO: 236 - protein, 9 aa, Artificial Sequence
  Synthetic
VSQGHHSWD

SEQ ID NO: 237 - protein, 9 aa, Artificial Sequence
  Synthetic
WHLRGHPHY

SEQ ID NO: 238 - protein, 9 aa, Artificial Sequence
  Synthetic
HSHHHQPWE

SEQ ID NO: 239 - protein, 9 aa, Artificial Sequence
  Synthetic
RRFRVHLHQ

SEQ ID NO: 240 - protein, 9 aa, Artificial Sequence
  Synthetic
GRQTKSHQH

SEQ ID NO: 241 - protein, 9 aa, Artificial Sequence
  Synthetic
PYSRHHHQL

SEQ ID NO: 242 - protein, 9 aa, Artificial Sequence
  Synthetic
VHGDHTRAW

SEQ ID NO: 243 - protein, 9 aa, Artificial Sequence
  Synthetic
DWQKRGRSW

SEQ ID NO: 244 - protein, 9 aa, Artificial Sequence
  Synthetic
YNWERFRKV

SEQ ID NO: 245 - protein, 9 aa, Artificial Sequence
  Synthetic
GWSRNVWFW

SEQ ID NO: 246 - protein, 9 aa, Artificial Sequence
  Synthetic
SQTQHRRHH

SEQ ID NO: 247 - protein, 9 aa, Artificial Sequence
  Synthetic
PNVKHKHRW

SEQ ID NO: 248 - protein, 9 aa, Artificial Sequence
  Synthetic
KHPAFHQHS

SEQ ID NO: 249 - protein, 9 aa, Artificial Sequence
  Synthetic
PHHHTDWRT

SEQ ID NO: 250 - protein, 9 aa, Artificial Sequence
  Synthetic
HTHKILHFH

SEQ ID NO: 251 - protein, 9 aa, Artificial Sequence
  Synthetic
PNHHFFLQF

SEQ ID NO: 252 - protein, 9 aa, Artificial Sequence
  Synthetic
RRYIGHNYS

SEQ ID NO: 253 - protein, 9 aa, Artificial Sequence
  Synthetic
THYHHQWDP

SEQ ID NO: 254 - protein, 8 aa, Artificial Sequence
  Synthetic
DKKHGQYK

SEQ ID NO: 255 - protein, 9 aa, Artificial Sequence
  Synthetic
YHIQGVYWR

SEQ ID NO: 256 - protein, 9 aa, Artificial Sequence
  Synthetic
SRFKHHVRN

SEQ ID NO: 257 - protein, 9 aa, Artificial Sequence
  Synthetic
WHHQHHLLA

SEQ ID NO: 258 - protein, 9 aa, Artificial Sequence
  Synthetic
HNKHPSPRV

SEQ ID NO: 259 - protein, 9 aa, Artificial Sequence
  Synthetic
TWFHQHEQQ

SEQ ID NO: 260 - protein, 9 aa, Artificial Sequence
  Synthetic
WKEWRYHHQ

SEQ ID NO: 261 - protein, 9 aa, Artificial Sequence
  Synthetic
FTKHWDRWY

SEQ ID NO: 262 - protein, 9 aa, Artificial Sequence
  Synthetic
TRLYDHSVW

SEQ ID NO: 263 - protein, 9 aa, Artificial Sequence
  Synthetic
WEYQTHHPA

SEQ ID NO: 264 - protein, 9 aa, Artificial Sequence
  Synthetic
VHFRSHRDF

SEQ ID NO: 265 - protein, 9 aa, Artificial Sequence
  Synthetic
SRHTHHHRS

SEQ ID NO: 266 - protein, 9 aa, Artificial Sequence
  Synthetic
TARYEHAPT

SEQ ID NO: 267 - protein, 9 aa, Artificial Sequence
  Synthetic
RHRKESWYV

SEQ ID NO: 268 - protein, 9 aa, Artificial Sequence
  Synthetic
DHGYARGHH

SEQ ID NO: 269 - protein, 9 aa, Artificial Sequence
  Synthetic
TPHKIWHWH

SEQ ID NO: 270 - protein, 9 aa, Artificial Sequence
  Synthetic
SYAQHTRLH

SEQ ID NO: 271 - protein, 9 aa, Artificial Sequence
  Synthetic
IDHRYHYLH

SEQ ID NO: 272 - protein, 9 aa, Artificial Sequence
  Synthetic
HGYNHRKVQ

SEQ ID NO: 273 - protein, 9 aa, Artificial Sequence
  Synthetic
GHLKAAPWH

SEQ ID NO: 274 - protein, 9 aa, Artificial Sequence
  Synthetic
KEKYASWER

SEQ ID NO: 275 - protein, 9 aa, Artificial Sequence
  Synthetic
KGHPHAHPH

SEQ ID NO: 276 - protein, 9 aa, Artificial Sequence
  Synthetic
PYRRHEHHQ

SEQ ID NO: 277 - protein, 9 aa, Artificial Sequence
  Synthetic
GFPHWFVHN

SEQ ID NO: 278 - protein, 9 aa, Artificial Sequence
  Synthetic
FRRYQSFHY

SEQ ID NO: 279 - protein, 9 aa, Artificial Sequence
  Synthetic
PRYRHHVDY

SEQ ID NO: 280 - protein, 9 aa, Artificial Sequence
  Synthetic
DYLKRNFRY

SEQ ID NO: 281 - protein, 9 aa, Artificial Sequence
  Synthetic
RSHPGKHVH

SEQ ID NO: 282 - protein, 9 aa, Artificial Sequence
  Synthetic
HHHRWAKWL

SEQ ID NO: 283 - protein, 9 aa, Artificial Sequence
  Synthetic
AAHHNHWHI

SEQ ID NO: 284 - protein, 9 aa, Artificial Sequence
  Synthetic
PVQKHAGSH

SEQ ID NO: 285 - protein, 9 aa, Artificial Sequence
  Synthetic
DNWRHWRIW

SEQ ID NO: 286 - protein, 8 aa, Artificial Sequence
  Synthetic
PRHHHWAF

SEQ ID NO: 287 - protein, 9 aa, Artificial Sequence
  Synthetic
VSYDDITWV

SEQ ID NO: 288 - protein, 9 aa, Artificial Sequence
  Synthetic
PPHPRVQHY

SEQ ID NO: 289 - protein, 9 aa, Artificial Sequence
  Synthetic
KQFRHHQHE

SEQ ID NO: 290 - protein, 9 aa, Artificial Sequence
  Synthetic
EHHEYHYRY

SEQ ID NO: 291 - protein, 8 aa, Artificial Sequence
  Synthetic
HHHHRQHP

SEQ ID NO: 292 - protein, 9 aa, Artificial Sequence
  Synthetic
KLHQAHHWH

SEQ ID NO: 293 - protein, 9 aa, Artificial Sequence
  Synthetic
EYHHYGTSR

SEQ ID NO: 294 - protein, 9 aa, Artificial Sequence
  Synthetic
DNKHIPQRQ

SEQ ID NO: 295 - protein, 9 aa, Artificial Sequence
  Synthetic
HKQWQWTIV

SEQ ID NO: 296 - protein, 9 aa, Artificial Sequence
  Synthetic
YRIGHGVQH

SEQ ID NO: 297 - protein, 9 aa, Artificial Sequence
  Synthetic
DQVRRIPHH

SEQ ID NO: 298 - protein, 9 aa, Artificial Sequence
  Synthetic
EGKHEFRFQ

SEQ ID NO: 299 - protein, 9 aa, Artificial Sequence
  Synthetic
HYWGRWYKI

SEQ ID NO: 300 - protein, 9 aa, Artificial Sequence
  Synthetic
KKVNHHYHK

SEQ ID NO: 301 - protein, 9 aa, Artificial Sequence
  Synthetic
WQAKHKDGK

SEQ ID NO: 302 - protein, 9 aa, Artificial Sequence
  Synthetic
IWSKHNWHW

SEQ ID NO: 303 - protein, 9 aa, Artificial Sequence
  Synthetic
KWQVARHDN

SEQ ID NO: 304 - protein, 9 aa, Artificial Sequence
  Synthetic
AHNYTLVWY

SEQ ID NO: 305 - protein, 9 aa, Artificial Sequence
  Synthetic
SSGNKHKHH

SEQ ID NO: 306 - protein, 9 aa, Artificial Sequence
  Synthetic
VWAHHKKYY

SEQ ID NO: 307 - protein, 8 aa, Artificial Sequence
  Synthetic
KVKHTRIH

SEQ ID NO: 308 - protein, 9 aa, Artificial Sequence
  Synthetic
PNKHHHAHK

SEQ ID NO: 309 - protein, 9 aa, Artificial Sequence
  Synthetic
FIKRYKLQR

SEQ ID NO: 310 - protein, 9 aa, Artificial Sequence
  Synthetic
RKDWHVRKL

SEQ ID NO: 311 - protein, 9 aa, Artificial Sequence
  Synthetic
IHQHHSQDW

SEQ ID NO: 312 - protein, 9 aa, Artificial Sequence
  Synthetic
NQKQGHKHK

SEQ ID NO: 313 - protein, 9 aa, Artificial Sequence
  Synthetic
FYAQKRTSY

SEQ ID NO: 314 - protein, 9 aa, Artificial Sequence
  Synthetic
AFNDGAVFI

SEQ ID NO: 315 - protein, 9 aa, Artificial Sequence
  Synthetic
VFLHNESHQ

SEQ ID NO: 316 - protein, 9 aa, Artificial Sequence
  Synthetic
KGHFHTHLV

SEQ ID NO: 317 - protein, 9 aa, Artificial Sequence
  Synthetic
KRWLKHHAH

SEQ ID NO: 318 - protein, 9 aa, Artificial Sequence
  Synthetic
YGHKHHFHW

SEQ ID NO: 319 - protein, 9 aa, Artificial Sequence
  Synthetic
VHFFHDQSE

SEQ ID NO: 320 - protein, 9 aa, Artificial Sequence
  Synthetic
QKKNRHHQK

SEQ ID NO: 321 - protein, 9 aa, Artificial Sequence
  Synthetic
DLRKHKWKS

SEQ ID NO: 322 - protein, 9 aa, Artificial Sequence
  Synthetic
SFHHHRHSD

SEQ ID NO: 323 - protein, 9 aa, Artificial Sequence
  Synthetic
EFYQGHWTN

SEQ ID NO: 324 - protein, 9 aa, Artificial Sequence
  Synthetic
VGHHWWLKE

SEQ ID NO: 325 - protein, 9 aa, Artificial Sequence
  Synthetic
VGTKHLRQS

SEQ ID NO: 326 - protein, 9 aa, Artificial Sequence
  Synthetic
KRRRHPSRG

SEQ ID NO: 327 - protein, 9 aa, Artificial Sequence
  Synthetic
NHVHNKHIH

SEQ ID NO: 328 - protein, 9 aa, Artificial Sequence
  Synthetic
TQSHPHRHY

SEQ ID NO: 329 - protein, 9 aa, Artificial Sequence
  Synthetic
YRHHHHWHF

SEQ ID NO: 330 - protein, 9 aa, Artificial Sequence
  Synthetic
EWTHGKENH

SEQ ID NO: 331 - protein, 9 aa, Artificial Sequence
  Synthetic
WYQFDGVSF

SEQ ID NO: 332 - protein, 9 aa, Artificial Sequence
  Synthetic
KKVRHEYAW

SEQ ID NO: 333 - protein, 9 aa, Artificial Sequence
  Synthetic
EHSWWRRGH

SEQ ID NO: 334 - protein, 9 aa, Artificial Sequence
  Synthetic
YHFHHYYKH

SEQ ID NO: 335 - protein, 9 aa, Artificial Sequence
  Synthetic
WQNFHDPFD

SEQ ID NO: 336 - protein, 9 aa, Artificial Sequence
  Synthetic
ARQHHHHSH

SEQ ID NO: 337 - protein, 9 aa, Artificial Sequence
  Synthetic
KLRHDKLTH

SEQ ID NO: 338 - protein, 9 aa, Artificial Sequence
  Synthetic
NHKFQSYQP

SEQ ID NO: 339 - protein, 9 aa, Artificial Sequence
  Synthetic
GKHSGARHK

SEQ ID NO: 340 - protein, 9 aa, Artificial Sequence
  Synthetic
NIHHEGKIP

SEQ ID NO: 341 - protein, 9 aa, Artificial Sequence
  Synthetic
IRQSSYKVH

SEQ ID NO: 342 - protein, 9 aa, Artificial Sequence
  Synthetic
VQHRWSLHW

SEQ ID NO: 343 - protein, 9 aa, Artificial Sequence
  Synthetic
GHKHHHHWS

SEQ ID NO: 344 - protein, 9 aa, Artificial Sequence
  Synthetic
VPGQQPIKN

SEQ ID NO: 345 - protein, 9 aa, Artificial Sequence
  Synthetic
WAAKRDWRN

SEQ ID NO: 346 - protein, 9 aa, Artificial Sequence
  Synthetic
YGDQPFKRH

SEQ ID NO: 347 - protein, 9 aa, Artificial Sequence
  Synthetic
GHHAKPHRW

SEQ ID NO: 348 - protein, 9 aa, Artificial Sequence
  Synthetic
FLKVRTIRS

SEQ ID NO: 349 - protein, 9 aa, Artificial Sequence
  Synthetic
LSQFQTHLW

SEQ ID NO: 350 - protein, 9 aa, Artificial Sequence
  Synthetic
VLWRYYYPK

SEQ ID NO: 351 - protein, 9 aa, Artificial Sequence
  Synthetic
HHQHWHVFP

SEQ ID NO: 352 - protein, 10 aa, Artificial Sequence
  Synthetic
IVQEFSLDQW

SEQ ID NO: 353 - protein, 9 aa, Artificial Sequence
  Synthetic
WKINNLYHE

SEQ ID NO: 354 - protein, 9 aa, Artificial Sequence
  Synthetic
FHYLHHTRS

SEQ ID NO: 355 - protein, 9 aa, Artificial Sequence
  Synthetic
KGWRNTHHK

SEQ ID NO: 356 - protein, 9 aa, Artificial Sequence
  Synthetic
IWSARSDKL

SEQ ID NO: 357 - protein, 9 aa, Artificial Sequence
  Synthetic
KAYHTYWHH

SEQ ID NO: 358 - protein, 9 aa, Artificial Sequence
  Synthetic
FAQAHHHTQ

SEQ ID NO: 359 - protein, 9 aa, Artificial Sequence
  Synthetic
NWQWIPHWA

SEQ ID NO: 360 - protein, 9 aa, Artificial Sequence
  Synthetic
KLDTLGQQR

SEQ ID NO: 361 - protein, 9 aa, Artificial Sequence
  Synthetic
WEWERHWLA

SEQ ID NO: 362 - protein, 9 aa, Artificial Sequence
  Synthetic
FTLGREGWF

SEQ ID NO: 363 - protein, 9 aa, Artificial Sequence
  Synthetic
YRGNTFKIW

SEQ ID NO: 364 - protein, 9 aa, Artificial Sequence
  Synthetic
VHSLLQHHD

SEQ ID NO: 365 - protein, 9 aa, Artificial Sequence
  Synthetic
YIKRHWSNF

SEQ ID NO: 366 - protein, 9 aa, Artificial Sequence
  Synthetic
DNERNQVES

SEQ ID NO: 367 - protein, 9 aa, Artificial Sequence
  Synthetic
IGYELFTVK

SEQ ID NO: 368 - protein, 9 aa, Artificial Sequence
  Synthetic
YRAWIHWTS

SEQ ID NO: 369 - protein, 9 aa, Artificial Sequence
  Synthetic
QIKHSHHAW

SEQ ID NO: 370 - protein, 9 aa, Artificial Sequence
  Synthetic
VYAWYWDKW

SEQ ID NO: 371 - protein, 9 aa, Artificial Sequence
  Synthetic
AVWWDGRGW

SEQ ID NO: 372 - protein, 9 aa, Artificial Sequence
  Synthetic
WHTHKHYQK

SEQ ID NO: 373 - protein, 9 aa, Artificial Sequence
  Synthetic
AKLQFGHKH

SEQ ID NO: 374 - protein, 7 aa, Artificial Sequence
  Synthetic
SFRWHRF

SEQ ID NO: 375 - protein, 9 aa, Artificial Sequence
  Synthetic
DYHLRHHNH

SEQ ID NO: 376 - protein, 9 aa, Artificial Sequence
  Synthetic
VYKYGSENW

SEQ ID NO: 377 - protein, 9 aa, Artificial Sequence
  Synthetic
ARSQAGHHN

SEQ ID NO: 378 - protein, 9 aa, Artificial Sequence
  Synthetic
EHWWFTFGD

SEQ ID NO: 379 - protein, 9 aa, Artificial Sequence
  Synthetic
GWKYAPQVW

SEQ ID NO: 380 - protein, 9 aa, Artificial Sequence
  Synthetic
YFKLPPWEE

SEQ ID NO: 381 - protein, 9 aa, Artificial Sequence
  Synthetic
PVHLHHKQH

SEQ ID NO: 382 - protein, 9 aa, Artificial Sequence
  Synthetic
NWHIINKYD

SEQ ID NO: 383 - protein, 7 aa, Artificial Sequence
  Synthetic
AHWHDWV

SEQ ID NO: 384 - protein, 9 aa, Artificial Sequence
  Synthetic
DHHHVQKSH

SEQ ID NO: 385 - protein, 9 aa, Artificial Sequence
  Synthetic
KFWQVQQKY

SEQ ID NO: 386 - protein, 9 aa, Artificial Sequence
  Synthetic
KPRFNIHHH

SEQ ID NO: 387 - protein, 9 aa, Artificial Sequence
  Synthetic
VNHISHAPI

SEQ ID NO: 388 - protein, 9 aa, Artificial Sequence
  Synthetic
LKPWEADLW

SEQ ID NO: 389 - protein, 9 aa, Artificial Sequence
  Synthetic
YKYPNIHPH

SEQ ID NO: 390 - protein, 9 aa, Artificial Sequence
  Synthetic
PKSLFNYQH

SEQ ID NO: 391 - protein, 9 aa, Artificial Sequence
  Synthetic
DGEFHVKQV

SEQ ID NO: 392 - protein, 9 aa, Artificial Sequence
  Synthetic
VYPKRQQVE

SEQ ID NO: 393 - protein, 9 aa, Artificial Sequence
  Synthetic
IIDRSKIEK

SEQ ID NO: 394 - protein, 9 aa, Artificial Sequence
  Synthetic
SIHSSWKKQ

SEQ ID NO: 395 - protein, 9 aa, Artificial Sequence
  Synthetic
NIHKTWDQT

SEQ ID NO: 396 - protein, 10 aa, Artificial Sequence
  Synthetic
GKVPFHAFHK

SEQ ID NO: 397 - protein, 9 aa, Artificial Sequence
  Synthetic
FYRLTHGHR

SEQ ID NO: 398 - protein, 10 aa, Artificial Sequence
  Synthetic
HIDYKNGRIW

SEQ ID NO: 399 - protein, 9 aa, Artificial Sequence
  Synthetic
VFHHQRGGQ

SEQ ID NO: 400 - protein, 9 aa, Artificial Sequence
  Synthetic
WGQSKPAHV

SEQ ID NO: 401 - protein, 9 aa, Artificial Sequence
  Synthetic
FHQRFPDHK

SEQ ID NO: 402 - protein, 9 aa, Artificial Sequence
  Synthetic
IQAAEGYKH

SEQ ID NO: 403 - protein, 9 aa, Artificial Sequence
  Synthetic
FHYQYRHQH

SEQ ID NO: 404 - protein, 9 aa, Artificial Sequence
  Synthetic
NKFLHGFEV

SEQ ID NO: 405 - protein, 9 aa, Artificial Sequence
  Synthetic
FKRHQHGHK

SEQ ID NO: 406 - protein, 9 aa, Artificial Sequence
  Synthetic
HYDRAHYFK

SEQ ID NO: 407 - protein, 9 aa, Artificial Sequence
  Synthetic
FRWKFHDYK

SEQ ID NO: 408 - protein, 9 aa, Artificial Sequence
  Synthetic
DRKHRKHWH

SEQ ID NO: 409 - protein, 9 aa, Artificial Sequence
  Synthetic
ATYKYRVDY

SEQ ID NO: 410 - protein, 9 aa, Artificial Sequence
  Synthetic
YFYHHHWFK

SEQ ID NO: 411 - protein, 9 aa, Artificial Sequence
  Synthetic
YRNHRHHIV

SEQ ID NO: 412 - protein, 9 aa, Artificial Sequence
  Synthetic
VQHARHKHY

SEQ ID NO: 413 - protein, 8 aa, Artificial Sequence
  Synthetic
KDRHHHNR

SEQ ID NO: 414 - protein, 9 aa, Artificial Sequence
  Synthetic
KQHHLYHFK

SEQ ID NO: 415 - protein, 9 aa, Artificial Sequence
  Synthetic
VNSFQAHRH

SEQ ID NO: 416 - protein, 9 aa, Artificial Sequence
  Synthetic
SHHLHRSAH

SEQ ID NO: 417 - protein, 9 aa, Artificial Sequence
  Synthetic
QPTFRHHYT

SEQ ID NO: 418 - protein, 9 aa, Artificial Sequence
  Synthetic
YSNSRERQW

SEQ ID NO: 419 - protein, 9 aa, Artificial Sequence
  Synthetic
GQIHKVRST

SEQ ID NO: 420 - protein, 9 aa, Artificial Sequence
  Synthetic
HYHHRHQHS

SEQ ID NO: 421 - protein, 9 aa, Artificial Sequence
  Synthetic
YFHREHEHQ

SEQ ID NO: 422 - protein, 9 aa, Artificial Sequence
  Synthetic
WHYHHSQWR

SEQ ID NO: 423 - protein, 9 aa, Artificial Sequence
  Synthetic
KHHRKHRHW

SEQ ID NO: 424 - protein, 9 aa, Artificial Sequence
  Synthetic
AHKHHLGFK

SEQ ID NO: 425 - protein, 9 aa, Artificial Sequence
  Synthetic
WHRHGSGFR

SEQ ID NO: 426 - protein, 9 aa, Artificial Sequence
  Synthetic
VDRFLHVKK

SEQ ID NO: 427 - protein, 9 aa, Artificial Sequence
  Synthetic
WPHSIDYRQ

SEQ ID NO: 428 - protein, 9 aa, Artificial Sequence
  Synthetic
KGRYSHHHG

SEQ ID NO: 429 - protein, 9 aa, Artificial Sequence
  Synthetic
YPQDKHKVL

SEQ ID NO: 430 - protein, 9 aa, Artificial Sequence
  Synthetic
GYRRHQGRG

SEQ ID NO: 431 - protein, 9 aa, Artificial Sequence
  Synthetic
ALHDTLHPS

SEQ ID NO: 432 - protein, 9 aa, Artificial Sequence
  Synthetic
KKPHNHRYY

SEQ ID NO: 433 - protein, 9 aa, Artificial Sequence
  Synthetic
AKHHWDTWS

SEQ ID NO: 434 - protein, 9 aa, Artificial Sequence
  Synthetic
VIHHKHRHQ

SEQ ID NO: 435 - protein, 9 aa, Artificial Sequence
  Synthetic
KYEQIDRWH

SEQ ID NO: 436 - protein, 9 aa, Artificial Sequence
  Synthetic
YRKRHTWFQ

SEQ ID NO: 437 - protein, 9 aa, Artificial Sequence
  Synthetic
KVNWHHYRH

SEQ ID NO: 438 - protein, 9 aa, Artificial Sequence
  Synthetic
SYHHKHFVK

SEQ ID NO: 439 - protein, 12 aa, Artificial Sequence
  Synthetic
WHGHFSKGGVAY

SEQ ID NO: 440 - protein, 9 aa, Artificial Sequence
  Synthetic
ATHLKHHNH

SEQ ID NO: 441 - protein, 9 aa, Artificial Sequence
  Synthetic
KRKWEHSHK

SEQ ID NO: 442 - protein, 9 aa, Artificial Sequence
  Synthetic
DHRHRHWYL

SEQ ID NO: 443 - protein, 9 aa, Artificial Sequence
  Synthetic
TKHSHSQLF

SEQ ID NO: 444 - protein, 9 aa, Artificial Sequence
  Synthetic
VHKSKHWFY

SEQ ID NO: 445 - protein, 9 aa, Artificial Sequence
  Synthetic
SQDHHFHRH

SEQ ID NO: 446 - protein, 9 aa, Artificial Sequence
  Synthetic
GHKYSHWSK

SEQ ID NO: 447 - protein, 9 aa, Artificial Sequence
  Synthetic
NKHHHHAHH

SEQ ID NO: 448 - protein, 9 aa, Artificial Sequence
  Synthetic
HNKYHPHNK

SEQ ID NO: 449 - protein, 9 aa, Artificial Sequence
  Synthetic
KHKHGWFHS

SEQ ID NO: 450 - protein, 9 aa, Artificial Sequence
  Synthetic
YRRHHDKKH

SEQ ID NO: 451 - protein, 9 aa, Artificial Sequence
  Synthetic
EGHRQHAKF

SEQ ID NO: 452 - protein, 9 aa, Artificial Sequence
  Synthetic
NSRGHHHHK

SEQ ID NO: 453 - protein, 9 aa, Artificial Sequence
  Synthetic
PHKRPHLYH

SEQ ID NO: 454 - protein, 9 aa, Artificial Sequence
  Synthetic
FYDLHPKLS

SEQ ID NO: 455 - protein, 9 aa, Artificial Sequence
  Synthetic
IHQHSQKKS

SEQ ID NO: 456 - protein, 9 aa, Artificial Sequence
  Synthetic
KRHHRHSHV

SEQ ID NO: 457 - protein, 9 aa, Artificial Sequence
  Synthetic
KKSHKAWAW

SEQ ID NO: 458 - protein, 9 aa, Artificial Sequence
  Synthetic
KGHKQHHHY

SEQ ID NO: 459 - protein, 9 aa, Artificial Sequence
  Synthetic
WKAERHKHY

SEQ ID NO: 460 - protein, 9 aa, Artificial Sequence
  Synthetic
QHRYTHHHT

SEQ ID NO: 461 - protein, 9 aa, Artificial Sequence
  Synthetic
SHKVHTHSK

SEQ ID NO: 462 - protein, 9 aa, Artificial Sequence
  Synthetic
KHLDQYHPS

SEQ ID NO: 463 - protein, 9 aa, Artificial Sequence
  Synthetic
SAHKHHHNH

SEQ ID NO: 464 - protein, 9 aa, Artificial Sequence
  Synthetic
KYKHQVKQH

SEQ ID NO: 465 - protein, 9 aa, Artificial Sequence
  Synthetic
ISHRHRHDI

SEQ ID NO: 466 - protein, 9 aa, Artificial Sequence
  Synthetic
NYHAHRSFY

SEQ ID NO: 467 - protein, 9 aa, Artificial Sequence
  Synthetic
WFKHHFWHR

SEQ ID NO: 468 - protein, 9 aa, Artificial Sequence
  Synthetic
KRKGDFLNY

SEQ ID NO: 469 - protein, 9 aa, Artificial Sequence
  Synthetic
HKPWGHHKL

SEQ ID NO: 470 - protein, 9 aa, Artificial Sequence
  Synthetic
QYKHKHWLW

SEQ ID NO: 471 - protein, 9 aa, Artificial Sequence
  Synthetic
FKRHHSWHH

SEQ ID NO: 472 - protein, 9 aa, Artificial Sequence
  Synthetic
KDRHHEFRH

SEQ ID NO: 473 - protein, 9 aa, Artificial Sequence
  Synthetic
HHHHFHNHR

SEQ ID NO: 474 - protein, 9 aa, Artificial Sequence
  Synthetic
SVNQHFKHK

SEQ ID NO: 475 - protein, 9 aa, Artificial Sequence
  Synthetic
FQHKLHKHH

SEQ ID NO: 476 - protein, 9 aa, Artificial Sequence
  Synthetic
DTRYDKWHG

SEQ ID NO: 477 - protein, 9 aa, Artificial Sequence
  Synthetic
HVHRVQHSK

SEQ ID NO: 478 - protein, 9 aa, Artificial Sequence
  Synthetic
WNYQFKSAS

SEQ ID NO: 479 - protein, 9 aa, Artificial Sequence
  Synthetic
QWWFHKHVK

SEQ ID NO: 480 - protein, 9 aa, Artificial Sequence
  Synthetic
ISHNPNHYH

SEQ ID NO: 481 - protein, 9 aa, Artificial Sequence
  Synthetic
TNLHSPDSP

SEQ ID NO: 482 - protein, 9 aa, Artificial Sequence
  Synthetic
FDKYNSHYL

SEQ ID NO: 483 - protein, 9 aa, Artificial Sequence
  Synthetic
STHQQKHQW

SEQ ID NO: 484 - protein, 9 aa, Artificial Sequence
  Synthetic
FHEEIKHWQ

SEQ ID NO: 485 - protein, 9 aa, Artificial Sequence
  Synthetic
WRDWNHRFP

SEQ ID NO: 486 - protein, 9 aa, Artificial Sequence
  Synthetic
KPHQTKWHH

SEQ ID NO: 487 - protein, 9 aa, Artificial Sequence
  Synthetic
RHHRQSHHW

SEQ ID NO: 488 - protein, 9 aa, Artificial Sequence
  Synthetic
IRHYHADRE

SEQ ID NO: 489 - protein, 9 aa, Artificial Sequence
  Synthetic
ASQVPPKHR

SEQ ID NO: 490 - protein, 9 aa, Artificial Sequence
  Synthetic
KHKHWHHQL

SEQ ID NO: 491 - protein, 9 aa, Artificial Sequence
  Synthetic
WEHHRTRWQ

SEQ ID NO: 492 - protein, 9 aa, Artificial Sequence
  Synthetic
FKTFKEWHV

SEQ ID NO: 493 - protein, 9 aa, Artificial Sequence
  Synthetic
KGHRWHDFK

SEQ ID NO: 494 - protein, 9 aa, Artificial Sequence
  Synthetic
KHAWQHHKS

SEQ ID NO: 495 - protein, 9 aa, Artificial Sequence
  Synthetic
YKHFKHHWR

SEQ ID NO: 496 - protein, 9 aa, Artificial Sequence
  Synthetic
AHRKFFQWH

SEQ ID NO: 497 - protein, 9 aa, Artificial Sequence
  Synthetic
WTHRSQVKV

SEQ ID NO: 498 - protein, 9 aa, Artificial Sequence
  Synthetic
FQWFKVGVP

SEQ ID NO: 499 - protein, 9 aa, Artificial Sequence
  Synthetic
VRYYSKYQW

SEQ ID NO: 500 - protein, 9 aa, Artificial Sequence
  Synthetic
NGWHVGHHI

SEQ ID NO: 501 - protein, 9 aa, Artificial Sequence
  Synthetic
TRFRHYLVT

SEQ ID NO: 502 - protein, 9 aa, Artificial Sequence
  Synthetic
SWRNVRPEF

SEQ ID NO: 503 - protein, 9 aa, Artificial Sequence
  Synthetic
FGHTFSWRY

SEQ ID NO: 504 - protein, 9 aa, Artificial Sequence
  Synthetic
FKHQKFYRD

SEQ ID NO: 505 - protein, 9 aa, Artificial Sequence
  Synthetic
WRNKWRAQD

SEQ ID NO: 506 - protein, 9 aa, Artificial Sequence
  Synthetic
YQKSYFHRH

SEQ ID NO: 507 - protein, 9 aa, Artificial Sequence
  Synthetic
WRPRPVHWK

SEQ ID NO: 508 - protein, 9 aa, Artificial Sequence
  Synthetic
DPQYKRHGY

SEQ ID NO: 509 - protein, 9 aa, Artificial Sequence
  Synthetic
VPHSVVHYK

SEQ ID NO: 510 - protein, 9 aa, Artificial Sequence
  Synthetic
AYSQSFIHH

SEQ ID NO: 511 - protein, 9 aa, Artificial Sequence
  Synthetic
FSHSTWRYH

SEQ ID NO: 512 - protein, 8 aa, Artificial Sequence
  Synthetic
SKKHQQHW

SEQ ID NO: 513 - protein, 9 aa, Artificial Sequence
  Synthetic
AKHPRIHVT

SEQ ID NO: 514 - protein, 9 aa, Artificial Sequence
  Synthetic
SPWHHPTHF

SEQ ID NO: 515 - protein, 9 aa, Artificial Sequence
  Synthetic
SNWFHHKHR

SEQ ID NO: 516 - protein, 9 aa, Artificial Sequence
  Synthetic
AYWPYQKPT

SEQ ID NO: 517 - protein, 9 aa, Artificial Sequence
  Synthetic
ILVGYNWHY

SEQ ID NO: 518 - protein, 9 aa, Artificial Sequence
  Synthetic
VHSHLPRHP

SEQ ID NO: 519 - protein, 9 aa, Artificial Sequence
  Synthetic
LFLHGVHIF

SEQ ID NO: 520 - protein, 9 aa, Artificial Sequence
  Synthetic
TSLPSEWFQ

SEQ ID NO: 521 - protein, 9 aa, Artificial Sequence
  Synthetic
TRHYHQRNR

SEQ ID NO: 522 - protein, 9 aa, Artificial Sequence
  Synthetic
YSAHHIRWH

SEQ ID NO: 523 - protein, 9 aa, Artificial Sequence
  Synthetic
ERAQHHTHP

SEQ ID NO: 524 - protein, 9 aa, Artificial Sequence
  Synthetic
WKKHHYGHY

SEQ ID NO: 525 - protein, 9 aa, Artificial Sequence
  Synthetic
SHHAHHSVQ

SEQ ID NO: 526 - protein, 9 aa, Artificial Sequence
  Synthetic
WKHWEHKPQ

SEQ ID NO: 527 - protein, 9 aa, Artificial Sequence
  Synthetic
AQVPVLLWY

SEQ ID NO: 528 - protein, 9 aa, Artificial Sequence
  Synthetic
WVHFYPWQQ

SEQ ID NO: 529 - protein, 9 aa, Artificial Sequence
  Synthetic
WHLAHVFYT

SEQ ID NO: 530 - protein, 9 aa, Artificial Sequence
  Synthetic
SSHHHKNHH

SEQ ID NO: 531 - protein, 9 aa, Artificial Sequence
  Synthetic
TKQPHGVHY

SEQ ID NO: 532 - protein, 9 aa, Artificial Sequence
  Synthetic
EHRTHHLGK

SEQ ID NO: 533 - protein, 9 aa, Artificial Sequence
  Synthetic
TNHRQDHPE

SEQ ID NO: 534 - protein, 9 aa, Artificial Sequence
  Synthetic
HRKTNWHSY

SEQ ID NO: 535 - protein, 9 aa, Artificial Sequence
  Synthetic
SGVHHAAVW

SEQ ID NO: 536 - protein, 9 aa, Artificial Sequence
  Synthetic
RYASSYWEW

SEQ ID NO: 537 - protein, 9 aa, Artificial Sequence
  Synthetic
NQSGVVVQV

SEQ ID NO: 538 - protein, 9 aa, Artificial Sequence
  Synthetic
YHNHQHTIH

SEQ ID NO: 539 - protein, 9 aa, Artificial Sequence
  Synthetic
KQELGTKTT

SEQ ID NO: 540 - protein, 9 aa, Artificial Sequence
  Synthetic
LVPQHHQHQ

SEQ ID NO: 541 - protein, 9 aa, Artificial Sequence
  Synthetic
WHDIAGGHY

SEQ ID NO: 542 - protein, 9 aa, Artificial Sequence
  Synthetic
RHDLHYHYP

SEQ ID NO: 543 - protein, 9 aa, Artificial Sequence
  Synthetic
YWHWKVRRF

SEQ ID NO: 544 - protein, 9 aa, Artificial Sequence
  Synthetic
DKQRYEDKQ

SEQ ID NO: 545 - protein, 9 aa, Artificial Sequence
  Synthetic
QHHHPHRHP

SEQ ID NO: 546 - protein, 9 aa, Artificial Sequence
  Synthetic
WHHFHNSYD

SEQ ID NO: 547 - protein, 9 aa, Artificial Sequence
  Synthetic
IWYSHRPRA

SEQ ID NO: 548 - protein, 9 aa, Artificial Sequence
  Synthetic
WDDHTLKWY

SEQ ID NO: 549 - protein, 9 aa, Artificial Sequence
  Synthetic
IAFWGPKRF

SEQ ID NO: 550 - protein, 9 aa, Artificial Sequence
  Synthetic
FPHRNKSDG

SEQ ID NO: 551 - protein, 9 aa, Artificial Sequence
  Synthetic
FKRSQQWEW

SEQ ID NO: 552 - protein, 9 aa, Artificial Sequence
  Synthetic
KHRYQPTHW

SEQ ID NO: 553 - protein, 9 aa, Artificial Sequence
  Synthetic
YHDIWAWHV

SEQ ID NO: 554 - protein, 9 aa, Artificial Sequence
  Synthetic
DFVKHHLHD

SEQ ID NO: 555 - protein, 9 aa, Artificial Sequence
  Synthetic
ISDHVHFGW

SEQ ID NO: 556 - protein, 9 aa, Artificial Sequence
  Synthetic
YHHRDHWGW

SEQ ID NO: 557 - protein, 9 aa, Artificial Sequence
  Synthetic
EWFTVGGIA

SEQ ID NO: 558 - protein, 9 aa, Artificial Sequence
  Synthetic
ERKHAHQHP

SEQ ID NO: 559 - protein, 9 aa, Artificial Sequence
  Synthetic
DSNLYNEWN

SEQ ID NO: 560 - protein, 9 aa, Artificial Sequence
  Synthetic
TAKHSHKKH

SEQ ID NO: 561 - protein, 9 aa, Artificial Sequence
  Synthetic
NWPHGIDPK

SEQ ID NO: 562 - protein, 9 aa, Artificial Sequence
  Synthetic
KHIHEHKSE

SEQ ID NO: 563 - protein, 9 aa, Artificial Sequence
  Synthetic
TKKFHQHER

SEQ ID NO: 564 - protein, 9 aa, Artificial Sequence
  Synthetic
TRHHQHYYL

SEQ ID NO: 565 - protein, 9 aa, Artificial Sequence
  Synthetic
WYWTQHHRW

SEQ ID NO: 566 - protein, 9 aa, Artificial Sequence
  Synthetic
YHVWNWRLK

SEQ ID NO: 567 - protein, 9 aa, Artificial Sequence
  Synthetic
FHHFRPHHH

SEQ ID NO: 568 - protein, 9 aa, Artificial Sequence
  Synthetic
FLNGKKRHV

SEQ ID NO: 569 - protein, 9 aa, Artificial Sequence
  Synthetic
WWKIHGSTV

SEQ ID NO: 570 - protein, 9 aa, Artificial Sequence
  Synthetic
NSDFHHNQQ

SEQ ID NO: 571 - protein, 9 aa, Artificial Sequence
  Synthetic
THHLRYHHQ

SEQ ID NO: 572 - protein, 9 aa, Artificial Sequence
  Synthetic
FYKYHQVRW

SEQ ID NO: 573 - protein, 9 aa, Artificial Sequence
  Synthetic
YSFRDHHWW

SEQ ID NO: 574 - protein, 9 aa, Artificial Sequence
  Synthetic
PFYRNHHHE

SEQ ID NO: 575 - protein, 9 aa, Artificial Sequence
  Synthetic
FQLNLRWGQ

SEQ ID NO: 576 - protein, 9 aa, Artificial Sequence
  Synthetic
VHNFHDIRH

SEQ ID NO: 577 - protein, 9 aa, Artificial Sequence
  Synthetic
AQHGHVPFS

SEQ ID NO: 578 - protein, 9 aa, Artificial Sequence
  Synthetic
PWHNAEIKH

SEQ ID NO: 579 - protein, 9 aa, Artificial Sequence
  Synthetic
AGWSSNKAD

SEQ ID NO: 580 - protein, 9 aa, Artificial Sequence
  Synthetic
KRQHHDVGQ

SEQ ID NO: 581 - protein, 9 aa, Artificial Sequence
  Synthetic
NSSYGWLWW

SEQ ID NO: 582 - protein, 9 aa, Artificial Sequence
  Synthetic
AFRDHRAPH

SEQ ID NO: 583 - protein, 9 aa, Artificial Sequence
  Synthetic
KWWSTQGIV

SEQ ID NO: 584 - protein, 9 aa, Artificial Sequence
  Synthetic
FRPVHHIRI

SEQ ID NO: 585 - protein, 9 aa, Artificial Sequence
  Synthetic
KVGQGVNLG

SEQ ID NO: 586 - protein, 9 aa, Artificial Sequence
  Synthetic
EWSNKHYQW

SEQ ID NO: 587 - protein, 9 aa, Artificial Sequence
  Synthetic
RQLKHHTNF

SEQ ID NO: 588 - protein, 9 aa, Artificial Sequence
  Synthetic
RNHVAEKYW

SEQ ID NO: 589 - protein, 9 aa, Artificial Sequence
  Synthetic
AYKSDKIRK

SEQ ID NO: 590 - protein, 9 aa, Artificial Sequence
  Synthetic
YDKPYIVWI

SEQ ID NO: 591 - protein, 9 aa, Artificial Sequence
  Synthetic
HDKHPQSWA

SEQ ID NO: 592 - protein, 9 aa, Artificial Sequence
  Synthetic
WDKHRQHLW

SEQ ID NO: 593 - protein, 9 aa, Artificial Sequence
  Synthetic
FHAFWHLAY

SEQ ID NO: 594 - protein, 112 aa, Artificial Sequence
  Synthetic
MIPRGLSEAKPATPEIQEIVDKVKPQLEEKTNETYGKLEAVQYKTQVLAHVIDHKYRHSTNYYIKVRAGDNKYMHLKVFNGPKKVNHHYHKADRVLTGYQVDKNKDDELTGF

SEQ ID NO: 595 - protein, 112 aa, Artificial Sequence
  Synthetic
MIPRGLSEAKPATPEIQEIVDKVKPQLEEKTNETYGKLEAVQYKTQVLALKGHKHHKTSTNYYIKVRAGDNKYMHLKVFNGPWQAKHKDGKADRVLTGYQVDKNKDDELTGF

SEQ ID NO: 596 - protein, 112 aa, Artificial Sequence
  Synthetic
MIPRGLSEAKPATPEIQEIVDKVKPQLEEKTNETYGKLEAVQYKTQVLAHNHHKYPHGSTNYYIKVRAGDNKYMHLKVFNGPIWSKHNWHWADRVLTGYQVDKNKDDELTGF

SEQ ID NO: 597 - protein, 112 aa, Artificial Sequence
  Synthetic
MIPRGLSEAKPATPEIQEIVDKVKPQLEEKTNETYGKLEAVQYKTQVLAVHKKHHKWFSTNYYIKVRAGDNKYMHLKVFNGPKWQVARHDNADRVLTGYQVDKNKDDELTGF

SEQ ID NO: 598 - protein, 112 aa, Artificial Sequence
  Synthetic
MIPRGLSEAKPATPEIQEIVDKVKPQLEEKTNETYGKLEAVQYKTQVLAKRHADHPRVSTNYYIKVRAGDNKYMHLKVFNGPAHNYTLVWYADRVLTGYQVDKNKDDELTGF

SEQ ID NO: 599 - protein, 112 aa, Artificial Sequence
  Synthetic
MIPRGLSEAKPATPEIQEIVDKVKPQLEEKTNETYGKLEAVQYKTQVLAQQPKQHGFHSTNYYIKVRAGDNKYMHLKVFNGPSSGNKHKHHADRVLTGYQVDKNKDDELTGF

SEQ ID NO: 600 - protein, 112 aa, Artificial Sequence
  Synthetic
MIPRGLSEAKPATPEIQEIVDKVKPQLEEKTNETYGKLEAVQYKTQVLAHHGHRTHSVSTNYYIKVRAGDNKYMHLKVFNGPVWAHHKKYYADRVLTGYQVDKNKDDELTGF

SEQ ID NO: 601 - protein, 111 aa, Artificial Sequence
  Synthetic
MIPRGLSEAKPATPEIQEIVDKVKPQLEEKTNETYGKLEAVQYKTQVLAKQHHWDVHRSTNYYIKVRAGDNKYMHLKVFNGPKVKHTRIHADRVLTGYQVDKNKDDELTGF

SEQ ID NO: 602 - protein, 112 aa, Artificial Sequence
  Synthetic
MIPRGLSEAKPATPEIQEIVDKVKPQLEEKTNETYGKLEAVQYKTQVLAGGQPAKQHFSTNYYIKVRAGDNKYMHLKVFNGPPNKHHHAHKADRVLTGYQVDKNKDDELTGF

SEQ ID NO: 603 - protein, 112 aa, Artificial Sequence
  Synthetic
MIPRGLSEAKPATPEIQEIVDKVKPQLEEKTNETYGKLEAVQYKTQVLANHVRWKDHDSTNYYIKVRAGDNKYMHLKVFNGPFIKRYKLQRADRVLTGYQVDKNKDDELTGF

SEQ ID NO: 604 - protein, 112 aa, Artificial Sequence
  Synthetic
MIPRGLSEAKPATPEIQEIVDKVKPQLEEKTNETYGKLEAVQYKTQVLAHSHHPEHWYSTNYYIKVRAGDNKYMHLKVFNGPRKDWHVRKLADRVLTGYQVDKNKDDELTGF

SEQ ID NO: 605 - protein, 112 aa, Artificial Sequence
  Synthetic
MIPRGLSEAKPATPEIQEIVDKVKPQLEEKTNETYGKLEAVQYKTQVLAKVKTHDHQRSTNYYIKVRAGDNKYMHLKVFNGPIHQHHSQDWADRVLTGYQVDKNKDDELTGF

SEQ ID NO: 606 - protein, 112 aa, Artificial Sequence
  Synthetic
MIPRGLSEAKPATPEIQEIVDKVKPQLEEKTNETYGKLEAVQYKTQVLAYREVSKRRTSTNYYIKVRAGDNKYMHLKVFNGPNQKQGHKHKADRVLTGYQVDKNKDDELTGF

SEQ ID NO: 607 - protein, 112 aa, Artificial Sequence
  Synthetic
MIPRGLSEAKPATPEIQEIVDKVKPQLEEKTNETYGKLEAVQYKTQVLAVTKRAWLKISTNYYIKVRAGDNKYMHLKVFNGPFYAQKRTSYADRVLTGYQVDKNKDDELTGF

SEQ ID NO: 608 - protein, 112 aa, Artificial Sequence
  Synthetic
MIPRGLSEAKPATPEIQEIVDKVKPQLEEKTNETYGKLEAVQYKTQVLAHNHRHYSKGSTNYYIKVRAGDNKYMHLKVFNGPAFNDGAVFIADRVLTGYQVDKNKDDELTGF

SEQ ID NO: 609 - protein, 112 aa, Artificial Sequence
  Synthetic
MIPRGLSEAKPATPEIQEIVDKVKPQLEEKTNETYGKLEAVQYKTQVLAKHHHHKHQHSTNYYIKVRAGDNKYMHLKVFNGPVFLHNESHQADRVLTGYQVDKNKDDELTGF

SEQ ID NO: 610 - protein, 112 aa, Artificial Sequence
  Synthetic
MIPRGLSEAKPATPEIQEIVDKVKPQLEEKTNETYGKLEAVQYKTQVLAHPHHVRSSVSTNYYIKVRAGDNKYMHLKVFNGPKGHFHTHLVADRVLTGYQVDKNKDDELTGF

SEQ ID NO: 611 - protein, 112 aa, Artificial Sequence
  Synthetic
MIPRGLSEAKPATPEIQEIVDKVKPQLEEKTNETYGKLEAVQYKTQVLAETPHERHKTSTNYYIKVRAGDNKYMHLKVFNGPKRWLKHHAHADRVLTGYQVDKNKDDELTGF

SEQ ID NO: 612 - protein, 112 aa, Artificial Sequence
  Synthetic
MIPRGLSEAKPATPEIQEIVDKVKPQLEEKTNETYGKLEAVQYKTQVLAGTIQHVNQHSTNYYIKVRAGDNKYMHLKVFNGPYGHKHHFHWADRVLTGYQVDKNKDDELTGF

SEQ ID NO: 613 - protein, 112 aa, Artificial Sequence
  Synthetic
MIPRGLSEAKPATPEIQEIVDKVKPQLEEKTNETYGKLEAVQYKTQVLAYNVGRKKHRSTNYYIKVRAGDNKYMHLKVFNGPVHFFHDQSEADRVLTGYQVDKNKDDELTGF

SEQ ID NO: 614 - protein, 112 aa, Artificial Sequence
  Synthetic
MIPRGLSEAKPATPEIQEIVDKVKPQLEEKTNETYGKLEAVQYKTQVLARRGPQKSSYSTNYYIKVRAGDNKYMHLKVFNGPQKKNRHHQKADRVLTGYQVDKNKDDELTGF

SEQ ID NO: 615 - protein, 112 aa, Artificial Sequence
  Synthetic
MIPRGLSEAKPATPEIQEIVDKVKPQLEEKTNETYGKLEAVQYKTQVLAHDRHQKHWRSTNYYIKVRAGDNKYMHLKVFNGPDLRKHKWKSADRVLTGYQVDKNKDDELTGF

SEQ ID NO: 616 - protein, 112 aa, Artificial Sequence
  Synthetic
MIPRGLSEAKPATPEIQEIVDKVKPQLEEKTNETYGKLEAVQYKTQVLAIPHHHKPRVSTNYYIKVRAGDNKYMHLKVFNGPSFHHHRHSDADRVLTGYQVDKNKDDELTGF

SEQ ID NO: 617 - protein, 112 aa, Artificial Sequence
  Synthetic
MIPRGLSEAKPATPEIQEIVDKVKPQLEEKTNETYGKLEAVQYKTQVLAKGKHYHSQQSTNYYIKVRAGDNKYMHLKVFNGPEFYQGHWTNADRVLTGYQVDKNKDDELTGF

SEQ ID NO: 618 - protein, 112 aa, Artificial Sequence
  Synthetic
MIPRGLSEAKPATPEIQEIVDKVKPQLEEKTNETYGKLEAVQYKTQVLAHKHKHHHTNSTNYYIKVRAGDNKYMHLKVFNGPVGHHWWLKEADRVLTGYQVDKNKDDELTGF

SEQ ID NO: 619 - protein, 112 aa, Artificial Sequence
  Synthetic
MIPRGLSEAKPATPEIQEIVDKVKPQLEEKTNETYGKLEAVQYKTQVLAGRHKHIQVHSTNYYIKVRAGDNKYMHLKVFNGPVGTKHLRQSADRVLTGYQVDKNKDDELTGF

SEQ ID NO: 620 - protein, 112 aa, Artificial Sequence
  Synthetic
MIPRGLSEAKPATPEIQEIVDKVKPQLEEKTNETYGKLEAVQYKTQVLAPHQHKLHAHSTNYYIKVRAGDNKYMHLKVFNGPKRRRHPSRGADRVLTGYQVDKNKDDELTGF

SEQ ID NO: 621 - protein, 112 aa, Artificial Sequence
  Synthetic
MIPRGLSEAKPATPEIQEIVDKVKPQLEEKTNETYGKLEAVQYKTQVLARRDHVWHKGSTNYYIKVRAGDNKYMHLKVFNGPNHVHNKHIHADRVLTGYQVDKNKDDELTGF

SEQ ID NO: 622 - protein, 112 aa, Artificial Sequence
  Synthetic
MIPRGLSEAKPATPEIQEIVDKVKPQLEEKTNETYGKLEAVQYKTQVLASHRSHADRRSTNYYIKVRAGDNKYMHLKVFNGPTQSHPHRHYADRVLTGYQVDKNKDDELTGF

SEQ ID NO: 623 - protein, 112 aa, Artificial Sequence
  Synthetic
MIPRGLSEAKPATPEIQEIVDKVKPQLEEKTNETYGKLEAVQYKTQVLASSQNGYQGHSTNYYIKVRAGDNKYMHLKVFNGPYRHHHHWHFADRVLTGYQVDKNKDDELTGF

SEQ ID NO: 624 - protein, 112 aa, Artificial Sequence
  Synthetic
MIPRGLSEAKPATPEIQEIVDKVKPQLEEKTNETYGKLEAVQYKTQVLATEGGKKLRRSTNYYIKVRAGDNKYMHLKVFNGPEWTHGKENHADRVLTGYQVDKNKDDELTGF

SEQ ID NO: 625 - protein, 112 aa, Artificial Sequence
  Synthetic
MIPRGLSEAKPATPEIQEIVDKVKPQLEEKTNETYGKLEAVQYKTQVLAKARHHQGHASTNYYIKVRAGDNKYMHLKVFNGPWYQFDGVSFADRVLTGYQVDKNKDDELTGF

SEQ ID NO: 626 - protein, 112 aa, Artificial Sequence
  Synthetic
MIPRGLSEAKPATPEIQEIVDKVKPQLEEKTNETYGKLEAVQYKTQVLANHSQGRHHISTNYYIKVRAGDNKYMHLKVFNGPKKVRHEYAWADRVLTGYQVDKNKDDELTGF

SEQ ID NO: 627 - protein, 112 aa, Artificial Sequence
  Synthetic
MIPRGLSEAKPATPEIQEIVDKVKPQLEEKTNETYGKLEAVQYKTQVLAKYWKADWYWSTNYYIKVRAGDNKYMHLKVFNGPEHSWWRRGHADRVLTGYQVDKNKDDELTGF

SEQ ID NO: 628 - protein, 112 aa, Artificial Sequence
  Synthetic
MIPRGLSEAKPATPEIQEIVDKVKPQLEEKTNETYGKLEAVQYKTQVLAHRQYPPGPHSTNYYIKVRAGDNKYMHLKVFNGPYHFHHYYKHADRVLTGYQVDKNKDDELTGF

SEQ ID NO: 629 - protein, 112 aa, Artificial Sequence
  Synthetic
MIPRGLSEAKPATPEIQEIVDKVKPQLEEKTNETYGKLEAVQYKTQVLARQHHHFYRTSTNYYIKVRAGDNKYMHLKVFNGPWQNFHDPFDADRVLTGYQVDKNKDDELTGF

SEQ ID NO: 630 - protein, 112 aa, Artificial Sequence
  Synthetic
MIPRGLSEAKPATPEIQEIVDKVKPQLEEKTNETYGKLEAVQYKTQVLAPQQHQPDPTSTNYYIKVRAGDNKYMHLKVFNGPARQHHHHSHADRVLTGYQVDKNKDDELTGF

SEQ ID NO: 631 - protein, 112 aa, Artificial Sequence
  Synthetic
MIPRGLSEAKPATPEIQEIVDKVKPQLEEKTNETYGKLEAVQYKTQVLALSFNNYHWHSTNYYIKVRAGDNKYMHLKVFNGPKLRHDKLTHADRVLTGYQVDKNKDDELTGF

SEQ ID NO: 632 - protein, 112 aa, Artificial Sequence
  Synthetic
MIPRGLSEAKPATPEIQEIVDKVKPQLEEKTNETYGKLEAVQYKTQVLAHHSKHHHLHSTNYYIKVRAGDNKYMHLKVFNGPNHKFQSYQPADRVLTGYQVDKNKDDELTGF

SEQ ID NO: 633 - protein, 112 aa, Artificial Sequence
  Synthetic
MIPRGLSEAKPATPEIQEIVDKVKPQLEEKTNETYGKLEAVQYKTQVLAHKYDRHSFKSTNYYIKVRAGDNKYMHLKVFNGPGKHSGARHKADRVLTGYQVDKNKDDELTGF

SEQ ID NO: 634 - protein, 112 aa, Artificial Sequence
  Synthetic
MIPRGLSEAKPATPEIQEIVDKVKPQLEEKTNETYGKLEAVQYKTQVLAKHSRHHHAQYTNYYIKVRAGDNKYMHLKVFNGPNIHHEGKIPADRVLTGYQVDKNKDDELTGF

SEQ ID NO: 635 - protein, 112 aa, Artificial Sequence
  Synthetic
MIPRGLSEAKPATPEIQEIVDKVKPQLEEKTNETYGKLEAVQYKTQVLARHHHSHFHLSTNYYIKVRAGDNKYMHLKVFNGPIRQSSYKVHADRVLTGYQVDKNKDDELTGF

SEQ ID NO: 636 - protein, 112 aa, Artificial Sequence
  Synthetic
MIPRGLSEAKPATPEIQEIVDKVKPQLEEKTNETYGKLEAVQYKTQVLARNHRHPHGQSTNYYIKVRAGDNKYMHLKVFNGPVQHRWSLHWADRVLTGYQVDKNKDDELTGF

SEQ ID NO: 637 - protein, 112 aa, Artificial Sequence
  Synthetic
MIPRGLSEAKPATPEIQEIVDKVKPQLEEKTNETYGKLEAVQYKTQVLAGHVEQVHFPYTNYYIKVRAGDNKYMHLKVFNGPGHKHHHHWSADRVLTGYQVDKNKDDELTGF

SEQ ID NO: 638 - protein, 112 aa, Artificial Sequence
  Synthetic
MIPRGLSEAKPATPEIQEIVDKVKPQLEEKTNETYGKLEAVQYKTQVLAEPHKHHYHLSTNYYIKVRAGDNKYMHLKVFNGPVPGQQPIKNADRVLTGYQVDKNKDDELTGF

SEQ ID NO: 639 - protein, 112 aa, Artificial Sequence
  Synthetic
MIPRGLSEAKPATPEIQEIVDKVKPQLEEKTNETYGKLEAVQYKTQVLAWKKHNWKYKSTNYYIKVRAGDNKYMHLKVFNGPWAAKRDWRNADRVLTGYQVDKNKDDELTGF

SEQ ID NO: 640 - protein, 112 aa, Artificial Sequence
  Synthetic
MIPRGLSEAKPATPEIQEIVDKVKPQLEEKTNETYGKLEAVQYKTQVLAIHHHTWGLKSTNYYIKVRAGDNKYMHLKVFNGPYGDQPFKRHADRVLTGYQVDKNKDDELTGF

SEQ ID NO: 641 - protein, 112 aa, Artificial Sequence
  Synthetic
MIPRGLSEAKPATPEIQEIVDKVKPQLEEKTNETYGKLEAVQYKTQVLAKPKYHHHDISTNYYIKVRAGDNKYMHLKVFNGPGHHAKPHRWADRVLTGYQVDKNKDDELTGF

SEQ ID NO: 642 - protein, 112 aa, Artificial Sequence
  Synthetic
MIPRGLSEAKPATPEIQEIVDKVKPQLEEKTNETYGKLEAVQYKTQVLAQYWHSHETWSTNYYIKVRAGDNKYMHLKVFNGPFLKVRTIRSADRVLTGYQVDKNKDDELTGF

SEQ ID NO: 643 - protein, 112 aa, Artificial Sequence
  Synthetic
MIPRGLSEAKPATPEIQEIVDKVKPQLEEKTNETYGKLEAVQYKTQVLARKQYHLPWTSTNYYIKVRAGDNKYMHLKVFNGPLSQFQTHLWADRVLTGYQVDKNEDDELTGF

SEQ ID NO: 644 - protein, 112 aa, Artificial Sequence
  Synthetic
MIPRGLSEAKPATPEIQEIVDKVKPQLEEKTNETYGKLEAVQYKTQVLAAIHWAHYILSTNYYIKVRAGDNKYMHLKVFNGPVLWRYYYPKADRVLTGYQVDKNKDDELTGF

SEQ ID NO: 645 - protein, 111 aa, Artificial Sequence
  Synthetic
MIPRGLSEAKPATPEIQEIVDKVKPQLEEKTNETYGKLEAVQYKTQVLADWRKLTLFSTNYYIKVRAGDNKYMHLKVFNGPHHQHWHVFPADRVLTGYQVDKNKDDELTGF

SEQ ID NO: 646 - protein, 113 aa, Artificial Sequence
  Synthetic
MIPRGLSEAKPATPEIQEIVDKVKPQLEEKTNETYGKLEAVQYKTQVLATKSHKFAYHSTNYYIKVRAGDNKYMHLKVFNGPIVQEFSLDQWADRVLTGYQVDKNKDDELTGF

SEQ ID NO: 647 - protein, 112 aa, Artificial Sequence
  Synthetic
MIPRGLSEAKPATPEIQEIVDKVKPQLEEKTNETYGKLEAVQYKTQVLASKYVHWHKFSTNYYIKVRAGDNKYMHLKVFNGPWKINNLYHEADRVLTGYQVDKNKDDELTGF

SEQ ID NO: 648 - protein, 112 aa, Artificial Sequence
  Synthetic
MIPRGLSEAKPATPEIQEIVDKVKPQLEEKTNETYGKLEAVQYKTQVLAKEQAAWVLHSTNYYIKVRAGDNKYMHLKVFNGPFHYLHHTRSADRVLTGYQVDKNKDDELTGF

SEQ ID NO: 649 - protein, 112 aa, Artificial Sequence
  Synthetic
MIPRGLSEAKPATPEIQEIVDKVKPQLEEKTNETYGKLEAVQYKTQVLAHLQAPRNAYSTNYYIKVRAGDNKYMHLKVFNGPKGWRNTHHKADRVLTGYQVDKNKDDELTGF

SEQ ID NO: 650 - protein, 112 aa, Artificial Sequence
  Synthetic
MIPRGLSEAKPATPEIQEIVDKVKPQLEEKTNETYGKLEAVQYKTQVLAGLTHRWRPHSTNYYIKVRAGDNKYMHLKVFNGPIWSARSDKLADRVLTGYQVDKNKDDELTGF

SEQ ID NO: 651 - protein, 112 aa, Artificial Sequence
  Synthetic
MIPRGLSEAKPATPEIQEIVDKVKPQLEEKTNETYGKLEAVQYKTQVLASHHRATDQVSTNYYIKVRAGDNKYMHLKVFNGPKAYHTYWHHADRVLTGYQVDKNKDDELTGF

SEQ ID NO: 652 - protein, 112 aa, Artificial Sequence
  Synthetic
MIPRGLSEAKPATPEIQEIVDKVKPQLEEKTNETYGKLEAVQYKTQVLANKWHIRFATSTNYYIKVRAGDNKYMHLKVFNGPFAQAHHHTQADRVLTGYQVDKNKDDELTGF

SEQ ID NO: 653 - protein, 112 aa, Artificial Sequence
  Synthetic
MIPRGLSEAKPATPEIQEIVDKVKPQLEEKTNETYGKLEAVQYKTQVLAHIRDSLWITSTNYYIKVRAGDNKYMHLKVFNGPNWQWIPHWAADRVLTGYQVDKNKDDELTGF

SEQ ID NO: 654 - protein, 112 aa, Artificial Sequence
  Synthetic
MIPRGLSEAKPATPEIQEIVDKVKPQLEEKTNETYGKLEAVQYKTQVLAYHISLSFRESTNYYIKVRAGDNKYMHLKVFNGPKLDTLGQQRADRVLTGYQVDKNKDDELTGF

SEQ ID NO: 655 - protein, 112 aa, Artificial Sequence
  Synthetic
MIPRGLSEAKPATPEIQEIVDKVKPQLEEKTNETYGKLEAVQYKTQVLAIHWAGFFRGSTNYYIKVRAGDNKYMHLKVFNGPWEWERHWLAADRVLTGYQVDKNKDDELTGF

SEQ ID NO: 656 - protein, 112 aa, Artificial Sequence
  Synthetic
MIPRGLSEAKPATPEIQEIVDKVKPQLEEKTNETYGKLEAVQYKTQVLAYYSERHFYKSTNYYIKVRAGDNKYMHLKVFNGPFTLGREGWFADRVLTGYQVDKNKDDELTGF

SEQ ID NO: 657 - protein, 112 aa, Artificial Sequence
  Synthetic
MIPRGLSEAKPATPEIQEIVDKVKPQLEEKTNETYGKLEAVQYKTQVLARQQQVHVPSSTNYYIKVRAGDNKYMHLKVFNGPYRGNTFKIWADRVLTGYQVDKNKDDELTGF

SEQ ID NO: 658 - protein, 112 aa, Artificial Sequence
  Synthetic
MIPRGLSEAKPATPEIQEIVDKVKPQLEEKTNETYGKLEAVQYKTQVLATKKNQLQGHSTNYYIKVRAGDNKYMHLKVFNGPVHSLLQHHDADRVLTGYQVDKNKDDELTGF

SEQ ID NO: 659 - protein, 112 aa, Artificial Sequence
  Synthetic
MIPRGLSEAKPATPEIQEIVDKVKPQLEEKTNETYGKLEAVQYKTQVLARDIHHHHHWSTNYYIKVRAGDNKYMHLKVFNGPYIKRHWSNFADRVLTGYQVDKNKDDELTGF

SEQ ID NO: 660 - protein, 112 aa, Artificial Sequence
  Synthetic
MIPRGLSEAKPATPEIQEIVDKVKPQLEEKTNETYGKLEAVQYKTQVLAQRQYTTKVLSTNYYIKVRAGDNKYMHLKVFNGPDNERNQVESADRVLTGYQVDKNKDDELTGF

SEQ ID NO: 661 - protein, 112 aa, Artificial Sequence
  Synthetic
MIPRGLSEAKPATPEIQEIVDKVKPQLEEKTNETYGKLEAVQYKTQVLAYWDWRFVEWSTNYYIKVRAGDNKYMHLKVFNGPIGYELFTVKADRVLTGYQVDKNKDDELTGF

SEQ ID NO: 662 - protein, 112 aa, Artificial Sequence
  Synthetic
MIPRGLSEAKPATPEIQEIVDKVKPQLEEKTNETYGKLEAVQYKTQVLAGFSKPFKWYSTNYYIKVRAGDNKYMHLKVFNGPYRAWIHWTSADRVLTGYQVDKNKDDELTGF

SEQ ID NO: 663 - protein, 112 aa, Artificial Sequence
  Synthetic
MIPRGLSEAKPATPEIQEIVDKVKPQLEEKTNETYGKLEAVQYKTQVLAIFQERLAGQSTNYYIKVRAGDNKYMHLKVFNGPQIKHSHHAWADRVLTGYQVDKNKDDELTGF

SEQ ID NO: 664 - protein, 112 aa, Artificial Sequence
  Synthetic
MIPRGLSEAKPATPEIQEIVDKVKPQLEEKTNETYGKLEAVQYKTQVLAKYDHHTQSLSTNYYIKVRAGDNKYMHLKVFNGPVYAWYWDKWADRVLTGYQVDKNKDDELTGF

SEQ ID NO: 665 - protein, 112 aa, Artificial Sequence
  Synthetic
MIPRGLSEAKPATPEIQEIVDKVKPQLEEKTNETYGKLEAVQYKTQVLAKHAHTPFGPSTNYYIKVRAGDNKYMHLKVFNGPAVWWDGRGWADRVLTGYQVDKNKDDELTGF

SEQ ID NO: 666 - protein, 112 aa, Artificial Sequence
  Synthetic
MIPRGLSEAKPATPEIQEIVDKVKPQLEEKTNETYGKLEAVQYKTQVLASLSRWLWAESTNYYIKVRAGDNKYMHLKVFNGPWHTHKHYQKADRVLTGYQVDKNKDDELTGF

SEQ ID NO: 667 - protein, 112 aa, Artificial Sequence
  Synthetic
MIPRGLSEAKPATPEIQEIVDKVKPQLEEKTNETYGKLEAVQYKTQVLAHQQHTQRYRSTNYYIKVRAGDNKYMHLKVFNGPAKLQFGHKHADRVLTGYQVDKNKDDELTGF

SEQ ID NO: 668 - protein, 110 aa, Artificial Sequence
  Synthetic
MIPRGLSEAKPATPEIQEIVDKVKPQLEEKTNETYGKLEAVQYKTQVLAHTISQHVSTNYYIKVRAGDNKYMHLKVFNGPPISFRWHRFADRVLTGYQVDKNKDDELTGF

SEQ ID NO: 669 - protein, 112 aa, Artificial Sequence
  Synthetic
MIPRGLSEAKPATPEIQEIVDKVKPQLEEKTNETYGKLEAVQYKTQVLADQWTWAHSRSTNYYIKVRAGDNKYMHLKVFNGPDYHLRHHNHADRVLTGYQVDKNKDDELTGF

SEQ ID NO: 670 - protein, 112 aa, Artificial Sequence
  Synthetic
MIPRGLSEAKPATPEIQEIVDKVKPQLEEKTNETYGKLEAVQYKTQVLAWYRVWRWVWSTNYYIKVRAGDNKYMHLKVFNGPVYKYGSENWADRVLTGYQVDKNKDDELTGF

SEQ ID NO: 671 - protein, 112 aa, Artificial Sequence
  Synthetic
MIPRGLSEAKPATPEIQEIVDKVKPQLEEKTNETYGKLEAVQYKTQVLAQKGSTHHNHSTNYYIKVRAGDNKYMHLKVFNGPARSQAGHHNADRVLTGYQVDKNKDDELTGF

SEQ ID NO: 672 - protein, 112 aa, Artificial Sequence
  Synthetic
MIPRGLSEAKPATPEIQEIVDKVKPQLEEKTNETYGKLEAVQYKTQVLAPEGRAGEPSSTNYYIKVRAGDNKYMHLKVFNGPEHWWFTFGDADRVLTGYQVDKNKDDELTGF

SEQ ID NO: 673 - protein, 112 aa, Artificial Sequence
  Synthetic
MIPRGLSEAKPATPEIQEIVDKVKPQLEEKTNETYGKLEAVQYKTQVLAHTRHHVTLWSTNYYIKVRAGDNKYMHLKVFNGPGWKYAPQVWADRVLTGYQVDKNKDDELTGF

SEQ ID NO: 674 - protein, 112 aa, Artificial Sequence
  Synthetic
MIPRGLSEAKPATPEIQEIVDKVKPQLEEKTNETYGKLEAVQYKTQVLAQRYYKHEYRSTNYYIKVRAGDNKYMHLKVFNGPYFKLPPWEEADRVLTGYQVDKNKDDELTGF

SEQ ID NO: 675 - protein, 112 aa, Artificial Sequence
  Synthetic
MIPRGLSEAKPATPEIQEIVDKVKPQLEEKTNETYGKLEAVQYKTQVLAQWFHRREVKSTNYYIKVRAGDNKYMHLKVFNGPPVHLHHKQHADRVLTGYQVDKNKDDELTGF

SEQ ID NO: 676 - protein, 112 aa, Artificial Sequence
  Synthetic
MIPRGLSEAKPATPEIQEIVDKVKPQLEEKTNETYGKLEAVQYKTQVLAHHLHATQPPSTNYYIKVRAGDNKYMHLKVFNGPNWHIINKYDADRVLTGYQVDKNKDDELTGF

SEQ ID NO: 677 - protein, 110 aa, Artificial Sequence
  Synthetic
MIPRGLSEAKPATPEIQEIVDKVKPQLEEKTNETYGKLEAVQYKTQVLAKHWHQPVAKSTNYYIKVRAGDNKYMHLKVFNGPAHWHDWVADRVLTGYQVDKNKDDELTGF

SEQ ID NO: 678 - protein, 112 aa, Artificial Sequence
  Synthetic
MIPRGLSEAKPATPEIQEIVDKVKPQLEEKTNETYGKLEAVQYKTQVLAYTTSHWTIGSTNYYIKVRAGDNKYMHLKVFNGPDHHHVQKSHADRVLTGYQVDKNKDDELTGF

SEQ ID NO: 679 - protein, 112 aa, Artificial Sequence
  Synthetic
MIPRGLSEAKPATPEIQEIVDKVKPQLEEKTNETYGKLEAVQYKTQVLAEHHHTQLSNSTNYYIKVRAGDNKYMHLKVFNGPKFWQVQQKYADRVLTGYQVDKNKDDELTGF

SEQ ID NO: 680 - protein, 112 aa, Artificial Sequence
  Synthetic
MIPRGLSEAKPATPEIQEIVDKVKPQLEEKTNETYGKLEAVQYKTQVLAHKPHNSKQISTNYYIKVRAGDNKYMHLKVFNGPKPRFNIHHHADRVLTGYQVDKNKDDELTGF

SEQ ID NO: 681 - protein, 112 aa, Artificial Sequence
  Synthetic
MIPRGLSEAKPATPEIQEIVDKVKPQLEEKTNETYGKLEAVQYKTQVLAHHTKHHSRWSTNYYIKVRAGDNKYMHLKVFNGPVNHISHAPIADRVLTGYQVDKNKDDELTGF

SEQ ID NO: 682 - protein, 112 aa, Artificial Sequence
  Synthetic
MIPRGLSEAKPATPEIQEIVDKVKPQLEEKTNETYGKLEAVQYKTQVLAFHRHHPIWHSTNYYIKVRAGDNKYMHLKVFNGPLKPWEADLWADRVLTGYQVDKNKDDELTGF

SEQ ID NO: 683 - protein, 112 aa, Artificial Sequence
  Synthetic
MIPRGLSEAKPATPEIQEIVDKVKPQLEEKTNETYGKLEAVQYKTQVLAARVTIDWKASTNYYIKVRAGDNKYMHLKVFNGPYKYPNIHPHADRVLTGYQVDKNKDDELTGF

SEQ ID NO: 684 - protein, 112 aa, Artificial Sequence
  Synthetic
MIPRGLSEAKPATPEIQEIVDKVKPQLEEKTNETYGKLEAVQYKTQVLAKLEQRRSHYSTNYYIKVRAGDNKYMHLKVFNGPPKSLFNYQHADRVLTGYQVDKNKDDELTGF

SEQ ID NO: 685 - protein, 112 aa, Artificial Sequence
  Synthetic
MIPRGLSEAKPATPEIQEIVDKVKPQLEEKTNETYGKLEAVQYKTQVLANIHHVHHQQSTNYYIKVRAGDNKYMHLKVFNGPDGEFHVKQVADRVLTGYQVDKNKDDELTGF

SEQ ID NO: 686 - protein, 112 aa, Artificial Sequence
  Synthetic
MIPRGLSEAKPATPEIQEIVDKVKPQLEEKTNETYGKLEAVQYKTQVLASHHTIAWYVSTNYYIKVRAGDNKYMHLKVFNGPVYPKRQQVEADRVLTGYQVDKNKDDELTGF

SEQ ID NO: 687 - protein, 112 aa, Artificial Sequence
  Synthetic
MIPRGLSEAKPATPEIQEIVDKVKPQLEEKTNETYGKLEAVQYKTQVLAHHQPYYGWQSTNYYIKVRAGDNKYMHLKVFNGPIIDRSKIEKADRVLTGYQVDKNKDDELTGF

SEQ ID NO: 688 - protein, 112 aa, Artificial Sequence
  Synthetic
MIPRGLSEAKPATPEIQEIVDKVKPQLEEKTNETYGKLEAVQYKTQVLAVHRSHHPIKSTNYYIKVRAGDNKYMHLKVFNGPSIHSSWKKQADRVLTGYQVDKNKDDELTGF

SEQ ID NO: 689 - protein, 112 aa, Artificial Sequence
  Synthetic
MIPRGLSEAKPATPEIQEIVDKVKPQLEEKTNETYGKLEAVQYKTQVLAWWSQRVKLFSTNYYIKVRAGDNKYMHLKVFNGPNIHKTWDQTADRVLTGYQVDKNKDDELTGF

SEQ ID NO: 690 - protein, 113 aa, Artificial Sequence
  Synthetic
MIPRGLSEAKPATPEIQEIVDKVKPQLEEKTNETYGKLEAVQYKTQVLAHYWKPHDIHSTNYYIKVRAGDNKYMHLKVFNGPGKVPFHAFHKADRVLTGYQVDKNKDDELTGF

SEQ ID NO: 691 - protein, 112 aa, Artificial Sequence
  Synthetic
MIPRGLSEAKPATPEIQEIVDKVKPQLEEKTNETYGKLEAVQYKTQVLATNQPRLYHQSTNYYIKVRAGDNKYMHLKVFNGPFYRLTHGHRADRVLTGYQVDKNKDDELTGF

SEQ ID NO: 692 - protein, 113 aa, Artificial Sequence
  Synthetic
MIPRGLSEAKPATPEIQEIVDKVKPQLEEKTNETYGKLEAVQYKTQVLAWSGKLLKHPSTNYYIKVRAGDNKYMHLKVFNGPHIDYKNGRIWADRVLTGYQVDKNKDDELTGF

SEQ ID NO: 693 - protein, 112 aa, Artificial Sequence
  Synthetic
MIPRGLSEAKPATPEIQEIVDKVKPQLEEKTNETYGKLEAVQYKTQVLAHRTSWDHKNSTNYYIKVRAGDNKYMHLKVFNGPVFHHQRGGQADRVLTGYQVDKNKDDELTGF

SEQ ID NO: 694 - protein, 113 aa, Artificial Sequence
  Synthetic
MIPRGLSEAKPATPEIQEIVDKVKPQLEEKTNETYGKLEAVQYKTQVLAPHKQKRHFFNSTNYYIKVRAGDNKYMHLKVFNGPWGQSKPAHVADRVLTGYQVDKNKDDELTGF

SEQ ID NO: 695 - protein, 112 aa, Artificial Sequence
  Synthetic
MIPRGLSEAKPATPEIQEIVDKVKPQLEEKTNETYGKLEAVQYKTQVLAHDQHKHDFKSTNYYIKVRAGDNKYMHLKVFNGPFHQRFPDHKADRVLTGYQVDKNKDDELTGF

SEQ ID NO: 696 - protein, 112 aa, Artificial Sequence
  Synthetic
MIPRGLSEAKPATPEIQEIVDKVKPQLEEKTNETYGKLEAVQYKTQVLANRVVHHFHHSTNYYIKVRAGDNKYMHLKVFKGPIQAAEGYKHADRVLTGYQVDKNKDDELTGF

SEQ ID NO: 697 - protein, 112 aa, Artificial Sequence
  Synthetic
MIPRGLSEAKPATPEIQEIVDKVKPQLEEKTNETYGKLEAVQYKTQVLAWHKAIRQQFSTNYYIKVRAGDNKYMHLKVFNGPFHYQYRHQHADRVLTGYQVDKNKDDELTGF

SEQ ID NO: 698 - protein, 112 aa, Artificial Sequence
  Synthetic
MIPRGLSEAKPATPEIQEIVDKVKPQLEEKTNETYGKLEAVQYKTQVLAWYHTHFANASTNYYIKVRAGDNKYMHLKVFNGPFKRHQHGHKADRVLTGYQVDKNKDDELTGF

SEQ ID NO: 699 - protein, 112 aa, Artificial Sequence
  Synthetic
MIPRGLSEAKPATPEIQEIVDKVKPQLEEKTNETYGKLEAVQYKTQVLATKEWHQHIKSTNYYIKVRAGDNKYMHLKVFNGPNKFLHGFEVADRVLTGYQVDKNKDDELTGF

SEQ ID NO: 700 - protein, 112 aa, Artificial Sequence
  Synthetic
MIPRGLSEAKPATPEIQEIVDKVKPQLEEKTNETYGKLEAVQYKTQVLATRVHNLSVLSTNYYIKVRAGDNKYMHLKVFNGPHYDRAHYFKADRVLTGYQVDKNKDDELTGF

SEQ ID NO: 701 - protein, 112 aa, Artificial Sequence
  Synthetic
MIPRGLSEAKPATPEIQEIVDKVKPQLEEKTNETYGKLEAVQYKTQVLAWNQPYWTTYSTNYYIKVRAGDNKYMHLKVFNGPFRWKFHDYKADRVLTGYQVDKNKDDELTGF

SEQ ID NO: 702 - protein, 112 aa, Artificial Sequence
  Synthetic
MIPRGLSEAKPATPEIQEIVDKVKPQLEEKTNETYGKLEAVQYKTQVLARPHNRDSHRSTNYYIKVRAGDNKYMHLKVFNGPDRKHRKHWHADRVLTGYQVDKNKDDELTGF

SEQ ID NO: 703 - protein, 112 aa, Artificial Sequence
  Synthetic
MIPRGLSEAKPATPEIQEIVDKVKPQLEEKTNETYGKLEAVQYKTQVLAGHPRHHWKYSTNYYIKVRAGDNKYMHLKVFNGPATYKYRVDYADRVLTGYQVDKNKDDELTGF

SEQ ID NO: 704 - protein, 112 aa, Artificial Sequence
  Synthetic
MIPRGLSEAKPATPEIQEIVDKVKPQLEEKTNETYGKLEAVQYKTQVLAYPGHHHARDSTNYYIKVRAGDNKYMHLKVFNGPYFYHHHWFKADRVLTGYQVDKNKDDELTGF

SEQ ID NO: 705 - protein, 112 aa, Artificial Sequence
  Synthetic
MIPRGLSEAKPATPEIQEIVDKVKPQLEEKTNETYGKLEAVQYKTQVLAIAKHHTWHQSTNYYIKVRAGDNKYMHLKVFNGPYRNHRHHIVADRVLTGYQVDKNKDDELTGF

SEQ ID NO: 706 - protein, 112 aa, Artificial Sequence
  Synthetic
MIPRGLSEAKPATPEIQEIVDKVKPQLEEKTNETYGKLEAVQYKTQVLAHNHGHWHFRSTNYYIKVRAGDNKYMHLKVFNGPVQHARHKHYADRVLTGYQVDKNKDDELTGF

SEQ ID NO: 707 - protein, 111 aa, Artificial Sequence
  Synthetic
MIPRGLSEAKPATPEIQEIVDKVKPQLEEKTNETYGKLEAVQYKTQVLAKKFDHYHQKSTNYYIKVRAGDNKYMHLKVFNGPKDRHHHNRADRVLTGYQVDKNKDDELTGF

SEQ ID NO: 708 - protein, 112 aa, Artificial Sequence
  Synthetic
MIPRGLSEAKPATPEIQEIVDKVKPQLEEKTNETYGKLEAVQYKTQVLASKAHRVEHKSTNYYIKVRAGDNKYMHLKVFNGPKQHHLYHFKADRVLTGYQVDKNKDDELTGF

SEQ ID NO: 709 - protein, 112 aa, Artificial Sequence
  Synthetic
MIPRGLSEAKPATPEIQEIVDKVKPQLEEKTNETYGKLEAVQYKTQVLAPKKHYHHGISTNYYIKVRAGDNKYMHLKVFNGPVNSFQAHRHADRVLTGYQVDKNKDDELTGF

SEQ ID NO: 710 - protein, 112 aa, Artificial Sequence
  Synthetic
MIPRGLSEAKPATPEIQEIVDKVKPQLEEKTNETYGKLEAVQYKTQVLANSHRIQHGFSTNYYIKVRAGDNKYMHLKVFNGPSHHLHRSAHADRVLTGYQVDKNKDDELTGF

SEQ ID NO: 711 - protein, 112 aa, Artificial Sequence
  Synthetic
MIPRGLSEAKPATPEIQEIVDKVKPQLEEKTNETYGKLEAVQYKTQVLAPHHSHHRLESTNYYIKVRAGDNKYMHLKVFNGPQPTFRHHYTADRVLTGYQVDKNKDDELTGF

SEQ ID NO: 712 - protein, 112 aa, Artificial Sequence
  Synthetic
MIPRGLSEAKPATPEIQEIVDKVKPQLEEKTNETYGKLEAVQYKTQVLAHVHHHREKGSTNYYIKVRAGDNKYMHLKVFNGPYSNSRERQWADRVLTGYQVDKNKDDELTGF

SEQ ID NO: 713 - protein, 112 aa, Artificial Sequence
  Synthetic
MIPRGLSEAKPATPEIQEIVDKVKPQLEEKTNETYGKLEAVQYKTQVLAKHKYHHTGHSTNYYIKVRAGDNKYMHLKVFNGPGQIHKVRSTADRVLTGYQVDKNKDDELTGF

SEQ ID NO: 714 - protein, 112 aa, Artificial Sequence
  Synthetic
MIPRGLSEAKPATPEIQEIVDKVKPQLEEKTNETYGKLEAVQYKTQVLAKYFAPHAPHSTNYYIKVRAGDNKYMHLKVFNGPHYHHRHQHSADRVLTGYQVDKNKDDELTGF

SEQ ID NO: 715 - protein, 112 aa, Artificial Sequence
  Synthetic
MIPRGLSEAKPATPEIQEIVDKVKPQLEEKTNETYGKLEAVQYKTQVLALHHRAHKHLSTNYYIKVRAGDNKYMHLKVFNGPYFHREHEHQADRVLTGYQVDKNKDDELTGF

SEQ ID NO: 716 - protein, 112 aa, Artificial Sequence
  Synthetic
MIPRGLSEAKPATPEIQEIVDKVKPQLEEKTNETYGKLEAVQYKTQVLAAHHGHYGRASTNYYIKVRAGDNKYMHLKVFNGPWHYHHSQWRADRVLTGYQVDKNKDDELTGF

SEQ ID NO: 717 - protein, 112 aa, Artificial Sequence
  Synthetic
MIPRGLSEAKPATPEIQEIVDKVKPQLEEKTNETYGKLEAVQYKTQVLAPEHYSLFKPSTNYYIKVRAGDNKYMHLKVFNGPKHHRKHRHWADRVLTGYQVDKNKDDELTGF

SEQ ID NO: 718 - protein, 112 aa, Artificial Sequence
  Synthetic
MIPRGLSEAKPATPEIQEIVDKVKPQLEEKTNETYGKLEAVQYKTQVLADHRPRHPKHSTNYYIKVRAGDNKYMHLKVFNGPAHKHHLGFKADRVLTGYQVDKNKDDELTGF

SEQ ID NO: 719 - protein, 112 aa, Artificial Sequence
  Synthetic
MIPRGLSEAKPATPEIQEIVDKVKPQLEEKTNETYGKLEAVQYKTQVLAKHEVHHHGNSTNYYIKVRAGDNKYMHLKVFNGPWHRHGSGFRADRVLTGYQVDKNKDDELTGF

SEQ ID NO: 720 - protein, 112 aa, Artificial Sequence
  Synthetic
MIPRGLSEAKPATPEIQEIVDKVKPQLEEKTNETYGKLEAVQYKTQVLAKSHHHKHRESTNYYIKVRAGDNKYMHLKVFNGPVDRFLHVKKADRVLTGYQVDKNKDDELTGF

SEQ ID NO: 721 - protein, 112 aa, Artificial Sequence
  Synthetic
MIPRGLSEAKPATPEIQEIVDKVKPQLEEKTNETYGKLEAVQYKTQVLAHRHHTHKWTSTNYYIKVRAGDNKYMHLKVFNGPWPHSIDYRQADRVLTGYQVDKNKDDELTGF

SEQ ID NO: 722 - protein, 112 aa, Artificial Sequence
  Synthetic
MIPRGLSEAKPATPEIQEIVDKVKPQLEEKTNETYGKLEAVQYKTQVLAGKHPHHHQNSTNYYIKVRAGDNKYMHLKVFNGPKGRYSHHHGADRVLTGYQVDKNKDDELTGF

SEQ ID NO: 723 - protein, 112 aa, Artificial Sequence
  Synthetic
MIPRGLSEAKPATPEIQEIVDKVKPQLEEKTNETYGKLEAVQYKTQVLAWHKHHLRYRSTNYYIKVRAGDNKYMHLKVFNGPYPQDKHKVLADRVLTGYQVDKNKDDELTGF

SEQ ID NO: 724 - protein, 112 aa, Artificial Sequence
  Synthetic
MIPRGLSEAKPATPEIQEIVDKVKPQLEEKTNETYGKLEAVQYKTQVLAKTHKEYHHSSTNYYIKVRAGDNKYMHLKVFNGPGYRRHQGRGADRVLTGYQVDKNKDDELTGF

SEQ ID NO: 725 - protein, 112 aa, Artificial Sequence
  Synthetic
MIPRGLSEAKPATPEIQEIVDKVKPQLEEKTNETYGKLEAVQYKTQVLARRHHHQHWSSTNYYIKVRAGDNKYMHLKVFNGPALHDTLHPSADRVLTGYQVDKNKDDELTGF

SEQ ID NO: 726 - protein, 112 aa, Artificial Sequence
  Synthetic
MIPRGLSEAKPATPEIQEIVDKVKPQLEEKTNETYGKLEAVQYKTQVLATHRWHQGSRSTNYYIKVRAGDNKYMHLKVFNGPKKPHNHRYYADRVLTGYQVDKNKDDELTGF

SEQ ID NO: 727 - protein, 112 aa, Artificial Sequence
  Synthetic
MIPRGLSEAKPATPEIQEIVDKVKPQLEEKTNETYGKLEAVQYKTQVLAKRGHHHPNHSTNYYIKVRAGDNKYMHLKVFNGPAKHHWDTWSADRVLTGYQVDKNKDDELTGF

SEQ ID NO: 728 - protein, 112 aa, Artificial Sequence
  Synthetic
MIPRGLSEAKPATPEIQEIVDKVKPQLEEKTNETYGKLEAVQYKTQVLAHTVPLRKHQSTNYYIKVRAGDNKYMHLKVFNGPVIHHKHRHQADRVLTGYQVDKNKDDELTGF

SEQ ID NO: 729 - protein, 112 aa, Artificial Sequence
  Synthetic
MIPRGLSEAKPATPEIQEIVDKVKPQLEEKTNETYGKLEAVQYKTQVLATYRWGHHFHSTNYYIKVRAGDNKYMHLKVFNGPKYEQIDRWHADRVLTGYQVDKNKDDELTGF

SEQ ID NO: 730 - protein, 112 aa, Artificial Sequence
  Synthetic
MIPRGLSEAKPATPEIQEIVDKVKPQLEEKTNETYGKLEAVQYKTQVLAFKHHDRGTHSTNYYIKVRAGDNKYMHLKVFNGPYRKRHTWFQADRVLTGYQVDKNKDDELTGF

SEQ ID NO: 731 - protein, 112 aa, Artificial Sequence
  Synthetic
MIPRGLSEAKPATPEIQEIVDKVKPQLEEKTNETYGKLEAVQYKTQVLATAKKHPKSHSTNYYIKVRAGDNKYMHLKVFNGPKVNWHHYRHADRVLTGYQVDKNKDDELTGF

SEQ ID NO: 732 - protein, 112 aa, Artificial Sequence
  Synthetic
MIPRGLSEAKPATPEIQEIVDKVKPQLEEKTNETYGKLEAVQYKTQVLAHYHFSKHHNSTNYYIKVRAGDNKYMHLKVFNGPSYHHKHFVKADRVLTGYQVDKNKDDELTGF

SEQ ID NO: 733 - protein, 115 aa, Artificial Sequence
  Synthetic
MIPRGLSEAKPATPEIQEIVDKVKPQLEEKTNETYGKLEAVQYKTQVLAYKHKHGKWRSTNYYIKVRAGDNKYMHLKVFNGPWHGHFSKGGVAYADRVLTGYQVDKNKDDELTGF

SEQ ID NO: 734 - protein, 112 aa, Artificial Sequence
  Synthetic
MIPRGLSEAKPATPEIQEIVDKVKPQLEEKTNETYGKLEAVQYKTQVLAVHHKPHKTESTNYYIKVRAGDNKYMHLKVFNGPATHLKHHNHADRVLTGYQVDKNKDDELTGF

SEQ ID NO: 735 - protein, 112 aa, Artificial Sequence
  Synthetic
MIPRGLSEAKPATPEIQEIVDKVKPQLEEKTNETYGKLEAVQYKTQVLAHGQRYHNKSSTNYYIKVRAGDNKYMHLKVFNGPKRKWEHSHKADRVLTGYQVDKNKDDELTGF

SEQ ID NO: 736 - protein, 112 aa, Artificial Sequence
  Synthetic
MIPRGLSEAKPATPEIQEIVDKVKPQLEEKTNETYGKLEAVQYKTQVLAHKHHRHVPSSTNYYIKVRAGDNKYMHLKVFNGPDHRHRHWYLADRVLTGYQVDKNKDDELTGF

SEQ ID NO: 737 - protein, 112 aa, Artificial Sequence
  Synthetic
MIPRGLSEAKPATPEIQEIVDKVKPQLEEKTNETYGKLEAVQYKTQVLAHRKHSWSRHSTNYYIKVRAGDNKYMHLKVFNGPTKHSHSQLFADRVLTGYQVDKNKDDELTGF

SEQ ID NO: 738 - protein, 112 aa, Artificial Sequence
  Synthetic
MIPRGLSEAKPATPEIQEIVDKVKPQLEEKTNETYGKLEAVQYKTQVLANRHYHQEYKSTNYYIKVRAGDNKYMHLKVFNGPVHKSKHWFYADRVLTGYQVDKNKDDELTGF

SEQ ID NO: 739 - protein, 112 aa, Artificial Sequence
  Synthetic
MIPRGLSEAKPATPEIQEIVDKVKPQLEEKTNETYGKLEAVQYKTQVLAKIKHHHSFKSTNYYIKVRAGDNKYMHLKVFNGPSQDHHFHRHADRVLTGYQVDKNKDDELTGF

SEQ ID NO: 740 - protein, 112 aa, Artificial Sequence
  Synthetic
MIPRGLSEAKPATPEIQEIVDKVKPQLEEKTNETYGKLEAVQYKTQVLAQHKRSHRQSSTNYYIKVRAGDNKYMHLKVFNGPGHKYSHWSKADRVLTGYQVDKNKDDELTGF

SEQ ID NO: 741 - protein, 110 aa, Artificial Sequence
  Synthetic
MIPRGLSEAKPATPEIQEIVDKVKPQLEEKTNETYGKLEAVQYKTQVLASVYKWKASTNYYIKVRAGDNKYMHLKVFNGPNKHHHHAHHADRVLTGYQVDKNKDDELTGF

SEQ ID NO: 742 - protein, 112 aa, Artificial Sequence
  Synthetic
MIPRGLSEAKPATPEIQEIVDKVKPQLEEKTNETYGKLEAVQYKTQVLARKLERTKYHSTNYYIKVRAGDNKYMHLKVFNGPHNKYHPHNKADRVLTGYQVDKNKDDELTGF

SEQ ID NO: 743 - protein, 112 aa, Artificial Sequence
  Synthetic
MIPRGLSEAKPATPEIQEIVDKVKPQLEEKTNETYGKLEAVQYKTQVLATGHKHQFHQSTNYYIKVRAGDNKYMHLKVFNGPKHKHGWFHSADRVLTGYQVDKNKDDELTGF

SEQ ID NO: 744 - protein, 112 aa, Artificial Sequence
  Synthetic
MIPRGLSEAKPATPEIQEIVDKVKPQLEEKTNETYGKLEAVQYKTQVLAWQELGHRVYSTNYYIKVRAGDNKYMHLKVFNGPYRRHHDKKHADRVLTGYQVDKNKDDELTGF

SEQ ID NO: 745 - protein, 112 aa, Artificial Sequence
  Synthetic
MIPRGLSEAKPATPEIQEIVDKVKPQLEEKTNETYGKLEAVQYKTQVLAHPHHTDQRHSTNYYIKVRAGDNKYMHLKVFNGPEGHRQHAKFADRVLTGYQVDKNKDDELTGF

SEQ ID NO: 746 - protein, 112 aa, Artificial Sequence
  Synthetic
MIPRGLSEAKPATPEIQEIVDKVKPQLEEKTNETYGKLEAVQYKTQVLAFHNHGHPHLSTNYYIKVRAGDNKYMHLKVFNGPNSRGHHHHKADRVLTGYQVDKNKDDELTGF

SEQ ID NO: 747 - protein, 112 aa, Artificial Sequence
  Synthetic
MIPRGLSEAKPATPEIQEIVDKVKPQLEEKTNETYGKLEAVQYKTQVLAWNHHHRNKQSTNYYIKVRAGDNKYMHLKVFNGPPHKRPHLYHADRVLTGYQVDKNKDDELTGF

SEQ ID NO: 748 - protein, 112 aa, Artificial Sequence
  Synthetic
MIPRGLSEAKPATPEIQEIVDKVKPQLEEKTNETYGKLEAVQYKTQVLATRHGHRHYRSTNYYIKVRAGDNKYMHLKVFNGPFYDLHPKLSADRVLTGYQVDKNKDDELTGF

SEQ ID NO: 749 - protein, 112 aa, Artificial Sequence
  Synthetic
MIPRGLSEAKPATPEIQEIVDKVKPQLEEKTNETYGKLEAVQYKTQVLAPHHRWHRQHSTNYYIKVRAGDNKYMHLKVFNGPIHQHSQKKSADRVLTGYQVDKNKDDELTGF

SEQ ID NO: 750 - protein, 112 aa, Artificial Sequence
  Synthetic
MIPRGLSEAKPATPEIQEIVDKVKPQLEEKTNETYGKLEAVQYKTQVLANLRHQTEHRSTNYYIKVRAGDNKYMHLKVFNGPKRHHRHSHVADRVLTGYQVDKNKDDELTGF

SEQ ID NO: 751 - protein, 112 aa, Artificial Sequence
  Synthetic
MIPRGLSEAKPATPEIQEIVDKVKPQLEEKTNETYGKLEAVQYKTQVLAGHRKHTHLLSTNYYIKVRAGDNKYMHLKVFNGPKKSHKAWAWADRVLTGYQVDKNKDDELTGF

SEQ ID NO: 752 - protein, 112 aa, Artificial Sequence
  Synthetic
MIPRGLSEAKPATPEIQEIVDKVKPQLEEKTNETYGKLEAVQYKTQVLARHSKPQHWPSTNYYIKVRAGDNKYMHLKVFNGPKGHKQHHHYADRVLTGYQVDKNKDDELTGF

SEQ ID NO: 753 - protein, 112 aa, Artificial Sequence
  Synthetic
MIPRGLSEAKPATPEIQEIVDKVKPQLEEKTNETYGKLEAVQYKTQVLAPHRSRFHKQSTNYYIKVRAGDNKYMHLKVFNGPWKAERHKHYADRVLTGYQVDKNKDDELTGF

SEQ ID NO: 754 - protein, 112 aa, Artificial Sequence
  Synthetic
MIPRGLSEAKPATPEIQEIVDKVKPQLEEKTNETYGKLEAVQYKTQVLAQRKHFHWDHSTNYYIKVRAGDNKYMHLKVFNGPQHRYTHHHTADRVLTGYQVDKNKDDELTGF

SEQ ID NO: 755 - protein, 112 aa, Artificial Sequence
  Synthetic
MIPRGLSEAKPATPEIQEIVDKVKPQLEEKTNETYGKLEAVQYKTQVLANKHHGQQHNSTNYYIKVRAGDNKYMHLKVFNGPSHKVHTHSKADRVLTGYQVDKNKDDELTGF

SEQ ID NO: 756 - protein, 112 aa, Artificial Sequence
  Synthetic
MIPRGLSEAKPATPEIQEIVDKVKPQLEEKTNETYGKLEAVQYKTQVLAKYHHKYKSYSTNYYIKVRAGDNKYMHLKVFNGPKHLDQYHPSADRVLTGYQVDKNKDDELTGF

SEQ ID NO: 757 - protein, 112 aa, Artificial Sequence
  Synthetic
MIPRGLSEAKPATPEIQEIVDKVKPQLEEKTNETYGKLEAVQYKTQVLAREWHHQTYYSTNYYIKVRAGDNKYMHLKVFNGPSAHKHHHNHADRVLTGYQVDKNKDDELTGF

SEQ ID NO: 758 - protein, 112 aa, Artificial Sequence
  Synthetic
MIPRGLSEAKPATPEIQEIVDKVKPQLEEKTNETYGKLEAVQYKTQVLARHYHDHHYRSTNYYIKVRAGDNKYMHLKVFNGPKYKHQVKQHADRVLTGYQVDKNKDDELTGF

SEQ ID NO: 759 - protein, 112 aa, Artificial Sequence
  Synthetic
MIPRGLSEAKPATPEIQEIVDKVKPQLEEKTNETYGKLEAVQYKTQVLASHTYRHSTGSTNYYIKVRAGDNKYMHLKVFNGPISHRHRHDIADRVLTGYQVDKNKDDELTGF

SEQ ID NO: 760 - protein, 112 aa, Artificial Sequence
  Synthetic
MIPRGLSEAKPATPEIQEIVDKVKPQLEEKTNETYGKLEAVQYKTQVLANHRHHHPHFSTNYYIKVRAGDNKYMHLKVFNGPNYHAHRSFYADRVLTGYQVDKNKDDELTGF

SEQ ID NO: 761 - protein, 112 aa, Artificial Sequence
  Synthetic
MIPRGLSEAKPATPEIQEIVDKVKPQLEEKTNETYGKLEAVQYKTQVLAHAKTRHHEHSTNYYIKVRAGDNKYMHLKVFNGPWFKHHFWHRADRVLTGYQVDKNKDDELTGF

SEQ ID NO: 762 - protein, 112 aa, Artificial Sequence
  Synthetic
MIPRGLSEAKPATPEIQEIVDKVKPQLEEKTNETYGKLEAVQYKTQVLAEPHQKHKRHSTNYYIKVRAGDNKYMHLKVFNGPKRKGDFLNYADRVLTGYQVDKNKDDELTGF

SEQ ID NO: 763 - protein, 112 aa, Artificial Sequence
  Synthetic
MIPRGLSEAKPATPEIQEIVDKVKPQLEEKTNETYGKLEAVQYKTQVLADRRHQHGRHSTNYYIKVRAGDNKYMHLKVFNGPHKPWGHHKLADRVLTGYQVDKNKDDELTGF

SEQ ID NO: 764 - protein, 112 aa, Artificial Sequence
  Synthetic
MIPRGLSEAKPATPEIQEIVDKVKPQLEEKTNETYGKLEAVQYKTQVLAHQHRHNLQQSTNYYIKVRAGDNKYMHLKVFNGPQYKHKHWLWADRVLTGYQVDKNKDDELTGF

SEQ ID NO: 765 - protein, 112 aa, Artificial Sequence
  Synthetic
MIPRGLSEAKPATPEIQEIVDKVKPQLEEKTNETYGKLEAVQYKTQVLAKRIHTWHTDSTNYYIKVRAGDNKYMHLKVFNGPFKRHHSWHHADRVLTGYQVDKNKDDELTGF

SEQ ID NO: 766 - protein, 112 aa, Artificial Sequence
  Synthetic
MIPRGLSEAKPATPEIQEIVDKVKPQLEEKTNETYGKLEAVQYKTQVLAYHHQPRYQQSTNYYIKVRAGDNKYMHLKVFNGPKDRHHEFRHADRVLTGYQVDKNKDDELTGF

SEQ ID NO: 767 - protein, 112 aa, Artificial Sequence
  Synthetic
MIPRGLSEAKPATPEIQEIVDKVKPQLEEKTNETYGKLEAVQYKTQVLAGIGRHRRRRSTNYYIKVRAGDNKYMHLKVFNGPHHHHFHNHRADRVLTGYQVDKNKDDELTGF

SEQ ID NO: 768 - protein, 112 aa, Artificial Sequence
  Synthetic
MIPRGLSEAKPATPEIQEIVDKVKPQLEEKTNETYGKLEAVQYKTQVLADQHKQHYHFSTNYYIKVRAGDNKYMHLKVFNGPSVNQHFKHKADRVLTGYQVDKNKDDELTGF

SEQ ID NO: 769 - protein, 112 aa, Artificial Sequence
  Synthetic
MIPRGLSEAKPATPEIQEIVDKVKPQLEEKTNETYGKLEAVQYKTQVLAGRHHESHKSSTNYYIKVRAGDNKYMHLKVFNGPFQHKLHKHHADRVLTGYQVDKNKDDELTGF

SEQ ID NO: 770 - protein, 112 aa, Artificial Sequence
  Synthetic
MIPRGLSEAKPATPEIQEIVDKVKPQLEEKTNETYGKLEAVQYKTQVLAKRHHHWHYSSTNYYIKVRAGDNKYMHLKVFNGPDTRYDKWHGADRVLTGYQVDKNKDDELTGF

SEQ ID NO: 771 - protein, 112 aa, Artificial Sequence
  Synthetic
MIPRGLSEAKPATPEIQEIVDKVKPQLEEKTNETYGKLEAVQYKTQVLANRKGGHRYHSTNYYIKVRAGDNKYMHLKVFNGPHVHRVQHSKADRVLTGYQVDKNKDDELTGF

SEQ ID NO: 772 - protein, 112 aa, Artificial Sequence
  Synthetic
MIPRGLSEAKPATPEIQEIVDKVKPQLEEKTNETYGKLEAVQYKTQVLARKWHGHWHRSTNYYIKVRAGDNKYMHLKVFNGPWNYQFKSASADRVLTGYQVDKNKDDELTGF

SEQ ID NO: 773 - protein, 112 aa, Artificial Sequence
  Synthetic
MIPRGLSEAKPATPEIQEIVDKVKPQLEEKTNETYGKLEAVQYKTQVLANWKRHHYHRSTNYYIKVRAGDNKYMHLKVFNGPQWWFHKHVKADRVLTGYQVDKNKDDELTGF

SEQ ID NO: 774 - protein, 112 aa, Artificial Sequence
  Synthetic
MIPRGLSEAKPATPEIQEIVDKVKPQLEEKTNETYGKLEAVQYKTQVLATRHHHRNRFSTNYYIKVRAGDNKYMHLKVFNGPISHNPNHYHADRVLTGYQVDKNKDDELTGF

SEQ ID NO: 775 - protein, 112 aa, Artificial Sequence
  Synthetic
MIPRGLSEAKPATPEIQEIVDKVKPQLEEKTNETYGKLEAVQYKTQVLAVKWDFKHFYSTNYYIKVRAGDNKYMHLKVFNGPTNLHSPDSPADRVLTGYQVDKNKDDELTGF

SEQ ID NO: 776 - protein, 112 aa, Artificial Sequence
  Synthetic
MIPRGLSEAKPATPEIQEIVDKVKPQLEEKTNETYGKLEAVQYKTQVLASDDLSPVKWSTNYYIKVRAGDNKYMHLKVFNGPFDKYNSHYLADRVLTGYQVDKNKDDELTGF

SEQ ID NO: 777 - protein, 112 aa, Artificial Sequence
  Synthetic
MIPRGLSEAKPATPEIQEIVDKVKPQLEEKTNETYGKLEAVQYKTQVLARHRQKWPIHSTNYYIKVRAGDNKYMHLKVFNGPSTHQQKHQWADRVLTGYQVDKNKDDELTGF

SEQ ID NO: 778 - protein, 111 aa, Artificial Sequence
  Synthetic
MIPRGLSEAKPATPEIQEIVDKVKPQLEEKTNETYGKLEAVQYKTQVLADRHAYHRHSTNYYIKVRAGDNKYMHLKVFNGPFHEEIKHWQADRVLTGYQVDKNKDDELTGF

SEQ ID NO: 779 - protein, 112 aa, Artificial Sequence
  Synthetic
MIPRGLSEAKPATPEIQEIVDKVKPQLEEKTNETYGKLEAVQYKTQVLAHRHHQKHAFSTNYYIKVRAGDNKYMHLKVFNGPWRDWNHRFPADRVLTGYQVDKNKDDELTGF

SEQ ID NO: 780 - protein, 112 aa, Artificial Sequence
  Synthetic
MIPRGLSEAKPATPEIQEIVDKVKPQLEEKTNETYGKLEAVQYKTQVLAQKGKHHDYRSTNYYIKVRAGDNKYMHLKVFNGPKPHQTKWHHADRVLTGYQVDKNKDDELTGF

SEQ ID NO: 781 - protein, 112 aa, Artificial Sequence
  Synthetic
MIPRGLSEAKPATPEIQEIVDKVKPQLEEKTNETYGKLEAVQYKTQVLAWNKHFYKQGSTNYYIKVRAGDNKYMHLKVFNGPRHHRQSHHWADRVLTGYQVDKNKDDELTGF

SEQ ID NO: 782 - protein, 112 aa, Artificial Sequence
  Synthetic
MIPRGLSEAKPATPEIQEIVDKVKPQLEEKTNETYGKLEAVQYKTQVLAKRRHNREFVSTNYYIKVRAGDNKYMHLKVFNGPIRHYHADREADRVLTGYQVDKNKDDELTGF

SEQ ID NO: 783 - protein, 112 aa, Artificial Sequence
  Synthetic
MIPRGLSEAKPATPEIQEIVDKVKPQLEEKTNETYGKLEAVQYKTQVLATRHVRHWTHSTNYYIKVRAGDNKYMHLKVFNGPASQVPPKHRADRVLTGYQVDKNKDDELTGF

SEQ ID NO: 784 - protein, 112 aa, Artificial Sequence
  Synthetic
MIPRGLSEAKPATPEIQEIVDKVKPQLEEKTNETYGKLEAVQYKTQVLANRKWQQNHHSTNYYIKVRAGDNKYMHLKVFNGPKHKHWHHQLADRVLTGYQVDKNKDDELTGF

SEQ ID NO: 785 - protein, 112 aa, Artificial Sequence
  Synthetic
MIPRGLSEAKPATPEIQEIVDKVKPQLEEKTNETYGKLEAVQYKTQVLARHREKHQPYSTNYYIKVRAGDNKYMHLKVFNGPWEHHRTRWQADRVLTGYQVDKNKDDELTGF

SEQ ID NO: 786 - protein, 112 aa, Artificial Sequence
  Synthetic
MIPRGLSEAKPATPEIQEIVDKVKPQLEEKTNETYGKLEAVQYKTQVLAYHKHNSKHSSTNYYIKVRAGDNKYMHLKVFNGPFKTFKEWHVADRVLTGYQVDKNKDDELTGF

SEQ ID NO: 787 - protein, 112 aa, Artificial Sequence
  Synthetic
MIPRGLSEAKPATPEIQEIVDKVKPQLEEKTNETYGKLEAVQYKTQVLAPAGQHKRKHSTNYYIKVRAGDNKYMHLKVFNGPKGHRWHDFKADRVLTGYQVDKNKDDELTGF

SEQ ID NO: 788 - protein, 112 aa, Artificial Sequence
  Synthetic
MIPRGLSEAKPATPEIQEIVDKVKPQLEEKTNETYGKLEAVQYKTQVLADRHKYPVRVSTNYYIKVRAGDNKYMHLKVFNGPKHAWQHHKSADRVLTGYQVDKNKDDELTGF

SEQ ID NO: 789 - protein, 112 aa, Artificial Sequence
  Synthetic
MIPRGLSEAKPATPEIQEIVDKVKPQLEEKTNETYGKLEAVQYKTQVLAGNNNPQGHVSTNYYIKVRAGDNKYMHLKVFNGPYKHFKHHWRADRVLTGYQVDKNKDDELTGF

SEQ ID NO: 790 - protein, 112 aa, Artificial Sequence
  Synthetic
MIPRGLSEAKPATPEIQEIVDKVKPQLEEKTNETYGKLEAVQYKTQVLAKQLHHHHYKSTNYYIKVRAGDNKYMHLKVFNGPAHRKFFQWHADRVLTGYQVDKNKDDELTGF

SEQ ID NO: 791 - protein, 112 aa, Artificial Sequence
  Synthetic
MIPRGLSEAKPATPEIQEIVDKVKPQLEEKTNETYGKLEAVQYKTQVLAQKHNWHRWHSTNYYIKVRAGDNKYMHLKVFNGPWTHRSQVKVADRVLTGYQVDKNKDDELTGF

SEQ ID NO: 792 - protein, 112 aa, Artificial Sequence
  Synthetic
MIPRGLSEAKPATPEIQEIVDKVKPQLEEKTNETYGKLEAVQYKTQVLAYKHLGYWQKSTNYYIKVRAGDNKYMHLKVFNGPFQWFKVGVPADRVLTGYQVDKNKDDELTGF

SEQ ID NO: 793 - protein, 112 aa, Artificial Sequence
  Synthetic
MIPRGLSEAKPATPEIQEIVDKVKPQLEEKTNETYGKLEAVQYKTQVLAHQKNFEAWESTNYYIKVRAGDNKYMHLKVFNGPVRYYSKYQWADRVLTGYQVDKNKDDELTGF

SEQ ID NO: 794 - protein, 112 aa, Artificial Sequence
  Synthetic
MIPRGLSEAKPATPEIQEIVDKVKPQLEEKTNETYGKLEAVQYKTQVLAERVRRRHPPSTNYYIKVRAGDNKYMHLKVFNGPNGWHVGHHIADRVLTGYQVDKNKDDELTGF

SEQ ID NO: 795 - protein, 112 aa, Artificial Sequence
  Synthetic
MIPRGLSEAKPATPEIQEIVDKVKPQLEEKTNETYGKLEAVQYKTQVLAHKVHIFREPSTNYYIKVRAGDNKYMHLKVFNGPTRFRHYLVTADRVLTGYQVDKNKDDELTGF

SEQ ID NO: 796 - protein, 112 aa, Artificial Sequence
  Synthetic
MIPRGLSEAKPATPEIQEIVDKVKPQLEEKTNETYGKLEAVQYKTQVLAVKSFHVHSHSTNYYIKVRAGDNKYMHLKVFNGPSWRNVRPEFADRVLTGYQVDKNKDDELTGF

SEQ ID NO: 797 - protein, 112 aa, Artificial Sequence
  Synthetic
MIPRGLSEAKPATPEIQEIVDKVKPQLEEKTNETYGKLEAVQYKTQVLAWHKDPPPPWSTNYYIKVRAGDNKYMHLKVFNGPFGHTFSWRYADRVLTGYQVDKNKDDELTGF

SEQ ID NO: 798 - protein, 112 aa, Artificial Sequence
  Synthetic
MIPRGLSEAKPATPEIQEIVDKVKPQLEEKTNETYGKLEAVQYKTQVLAHRYAHNHFLSTNYYIKVRAGDNKYMHLKVFNGPFKHQKFYRDADRVLTGYQVDKNKDDELTGF

SEQ ID NO: 799 - protein, 112 aa, Artificial Sequence
  Synthetic
MIPRGLSEAKPATPEIQEIVDKVKPQLEEKTNETYGKLEAVQYKTQVLAVSHALKTHTSTNYYIKVRAGDNKYMHLKVFNGPWRNKWRAQDADRVLTGYQVDKNKDDELTGF

SEQ ID NO: 800 - protein, 112 aa, Artificial Sequence
  Synthetic
MIPRGLSEAKPATPEIQEIVDKVKPQLEEKTNETYGKLEAVQYKTQVLAHQSRAIYVYSTNYYIKVRAGDNKYMHLKVFNGPYQKSYFHRHADRVLTGYQVDKNKDDELTGF

SEQ ID NO: 801 - protein, 112 aa, Artificial Sequence
  Synthetic
MIPRGLSEAKPATPEIQEIVDKVKPQLEEKTNETYGKLEAVQYKTQVLAHHTTYHQHHSTNYYIKVRAGDNKYMHLKVFNGPWRPRPVHWKADRVLTGYQVDKNKDDELTGF

SEQ ID NO: 802 - protein, 112 aa, Artificial Sequence
  Synthetic
MIPRGLSEAKPATPEIQEIVDKVKPQLEEKTNETYGKLEAVQYKTQVLATWWRNVQHHSTNYYIKVRAGDNKYMHLKVFNGPDPQYKRHGYADRVLTGYQVDKNKDDELTGF

SEQ ID NO: 803 - protein, 112 aa, Artificial Sequence
  Synthetic
MIPRGLSEAKPATPEIQEIVDKVKPQLEEKTNETYGKLEAVQYKTQVLAWNKHNYQHQSTNYYIKVRAGDNKYMHLKVFNGPVPHSVVHYKADRVLTGYQVDKNKDDELTGF

SEQ ID NO: 804 - protein, 112 aa, Artificial Sequence
  Synthetic
MIPRGLSEAKPATPEIQEIVDKVKPQLEEKTNETYGKLEAVQYKTQVLAQHTLRVHTVSTNYYIKVRAGDNKYMHLKVFNGPAYSQSFIHHADRVLTGYQVDKNKDDELTGF

SEQ ID NO: 805 - protein, 112 aa, Artificial Sequence
  Synthetic
MIPRGLSEAKPATPEIQEIVDKVKPQLEEKTNETYGKLEAVQYKTQVLANQHFHQAGHSTNYYIKVRAGDNKYMHLKVFNGPFSHSTWRYHADRVLTGYQVDKNKDDELTGF

SEQ ID NO: 806 - protein, 111 aa, Artificial Sequence
  Synthetic
MIPRGLSEAKPATPEIQEIVDKVKPQLEEKTNETYGKLEAVQYKTQVLARQWTDRVWVSTNYYIKVRAGDNKYMHLKVFNGPSKKHQQHWADRVLTGYQVDKNKDDELTGF

SEQ ID NO: 807 - protein, 112 aa, Artificial Sequence
  Synthetic
MIPRGLSEAKPATPEIQEIVDKVKPQLEEKTNETYGKLEAVQYKTQVLADHDYFHHNKSTNYYIKVRAGDNKYMHLKVFNGPAKHPRIHVTADRVLTGYQVDKNKDDELTGF

SEQ ID NO: 808 - protein, 112 aa, Artificial Sequence
  Synthetic
MIPRGLSEAKPATPEIQEIVDKVKPQLEEKTNETYGKLEAVQYKTQVLAYWDVGPGFNSTNYYIKVRAGDNKYMHLKVFNGPSPWHHPTHFADRVLTGYQVDKNKDDELTGF

SEQ ID NO: 809 - protein, 112 aa, Artificial Sequence
  Synthetic
MIPRGLSEAKPATPEIQEIVDKVKPQLEEKTNETYGKLEAVQYKTQVLAGIHGHHEYYSTNYYIKVRAGDNKYMHLKVFNGPSNWFHHKHRADRVLTGYQVDKNKDDELTGF

SEQ ID NO: 810 - protein, 112 aa, Artificial Sequence
  Synthetic
MIPRGLSEAKPATPEIQEIVDKVKPQLEEKTNETYGKLEAVQYKTQVLAWQRSRYGKYSTNYYIKVRAGDNKYMHLKVFNGPAYWPYQKPTADRVLTGYQVDKNKDDELTGF

SEQ ID NO: 811 - protein, 112 aa, Artificial Sequence
  Synthetic
MIPRGLSEAKPATPEIQEIVDKVKPQLEEKTNETYGKLEAVQYKTQVLAYHQQHWRVHSTNYYIKVRAGDNKYMHLKVFNGPILVGYNWHYADRVLTGYQVDKNKDDELTGF

SEQ ID NO: 812 - protein, 112 aa, Artificial Sequence
  Synthetic
MIPRGLSEAKPATPEIQEIVDKVKPQLEEKTNETYGKLEAVQYKTQVLAATRNSYPRHSTNYYIKVRAGDNKYMHLKVFNGPVHSHLPRHPADRVLTGYQVDKNKDDELTGF

SEQ ID NO: 813 - protein, 112 aa, Artificial Sequence
  Synthetic
MIPRGLSEAKPATPEIQEIVDKVKPQLEEKTNETYGKLEAVQYKTQVLAEHHHAHWATSTNYYIKVRAGDNKYMHLKVFNGPLFLHGVHIFADRVLTGYQVDKNKDDELTGF

SEQ ID NO: 814 - protein, 112 aa, Artificial Sequence
  Synthetic
MIPRGLSEAKPATPEIQEIVDKVKPQLEEKTNETYGKLEAVQYKTQVLAKQHQRSFIISTNYYIKVRAGDNKYMHLKVFNGPTSLPSEWFQADRVLTGYQVDKNKDDELTGF

SEQ ID NO: 815 - protein, 112 aa, Artificial Sequence
  Synthetic
MIPRGLSEAKPATPEIQEIVDKVKPQLEEKTNETYGKLEAVQYKTQVLAQFWGHRVEHSTNYYIKVRAGDNKYMHLKVFNGPTRHYHQRNRADRVLTGYQVDKNKDDELTGF

SEQ ID NO: 816 - protein, 112 aa, Artificial Sequence
  Synthetic
MIPRGLSEAKPATPEIQEIVDKVKPQLEEKTNETYGKLEAVQYKTQVLAFPSSHRTSYSTNYYIKVRAGDNKYMHLKVFNGPYSAHHIRWHADRVLTGYQVDKNKDDELTGF

SEQ ID NO: 817 - protein, 112 aa, Artificial Sequence
  Synthetic
MIPRGLSEAKPATPEIQEIVDKVKPQLEEKTNETYGKLEAVQYKTQVLASSKYIDHRQSTNYYIKVRAGDNKYMHLKVFNGPERAQHHTHPADRVLTGYQVDKNKDDELTGF

SEQ ID NO: 818 - protein, 112 aa, Artificial Sequence
  Synthetic
MIPRGLSEAKPATPEIQEIVDKVKPQLEEKTNETYGKLEAVQYKTQVLAYWRHEHSSPSTNYYIKVRAGDNKYMHLKVFNGPWKKHHYGHYADRVLTGYQVDKNKDDELTGF

SEQ ID NO: 819 - protein, 112 aa, Artificial Sequence
  Synthetic
MIPRGLSEAKPATPEIQEIVDKVKPQLEEKTNETYGKLEAVQYKTQVLAERAHYDHHYSTNYYIKVRAGDNKYMHLKVFNGPSHHAHHSVQADRVLTGYQVDKNKDDELTGF

SEQ ID NO: 820 - protein, 112 aa, Artificial Sequence
  Synthetic
MIPRGLSEAKPATPEIQEIVDKVKPQLEEKTNETYGKLEAVQYKTQVLAWRHKAYIYGSTNYYIKVRAGDNKYMHLKVFNGPWKHWEHKPQADRVLTGYQVDKNKDDELTGF

SEQ ID NO: 821 - protein, 112 aa, Artificial Sequence
  Synthetic
MIPRGLSEAKPATPEIQEIVDKVKPQLEEKTNETYGKLEAVQYKTQVLAPQIKEQYNGSTNYYIKVRAGDNKYMHLKVFNGPAQVPVLLWYADRVLTGYQVDKNKDDELTGF

SEQ ID NO: 822 - protein, 112 aa, Artificial Sequence
  Synthetic
MIPRGLSEAKPATPEIQEIVDKVKPQLEEKTNETYGKLEAVQYKTQVLAFKKVARDHWSTNYYIKVRAGDNKYMHLKVFNGPWVHFYPWQQADRVLTGYQVDKNKDDELTGF

SEQ ID NO: 823 - protein, 112 aa, Artificial Sequence
  Synthetic
MIPRGLSEAKPATPEIQEIVDKVKPQLEEKTNETYGKLEAVQYKTQVLAAQKHHWHKTSTNYYIKVRAGDNKYMHLKVFNGPWHLAHVFYTADRVLTGYQVDKNKDDELTGF

SEQ ID NO: 824 - protein, 112 aa, Artificial Sequence
  Synthetic
MIPRGLSEAKPATPEIQEIVDKVKPQLEEKTNETYGKLEAVQYKTQVLAVSQGHHSWDSTNYYIKVRAGDNKYMHLKVFNGPSSHHHKNHHADRVLTGYQVDKNKDDELTGF

SEQ ID NO: 825 - protein, 112 aa, Artificial Sequence
  Synthetic
MIPRGLSEAKPATPEIQEIVDKVKPQLEEKTNETYGKLEAVQYKTQVLAWHLRGHPHYSTNYYIKVRAGDNKYMHLKVFNGPTKQPHGVHYADRVLTGYQVDKNKDDELTGF

SEQ ID NO: 826 - protein, 112 aa, Artificial Sequence
  Synthetic
MIPRGLSEAKPATPEIQEIVDKVKPQLEEKTNETYGKLEAVQYKTQVLAHSHHHQPWESTNYYIKVRAGDNKYMHLKVFNGPEHRTHHLGKADRVLTGYQVDKNKDDELTGF

SEQ ID NO: 827 - protein, 112 aa, Artificial Sequence
  Synthetic
MIPRGLSEAKPATPEIQEIVDKVKPQLEEKTNETYGKLEAVQYKTQVLARRFRVHLHQSTNYYIKVRAGDNKYMHLKVFNGPTNHRQDHPEADRVLTGYQVDKNKDDELTGF

SEQ ID NO: 828 - protein, 112 aa, Artificial Sequence
  Synthetic
MIPRGLSEAKPATPEIQEIVDKVKPQLEEKTNETYGKLEAVQYKTQVLAGRQTKSHQHSTNYYIKVRAGDNKYMHLKVFNGPHRKTNWHSYADRVLTGYQVDKNKDDELTGF

SEQ ID NO: 829 - protein, 112 aa, Artificial Sequence
  Synthetic
MIPRGLSEAKPATPEIQEIVDKVKPQLEEKTNETYGKLEAVQYKTQVLAPYSRHHHQLSTNYYIKVRAGDNKYMHLKVFNGPSGVHHAAVWADRVLTGYQVDKNKDDELTGF

SEQ ID NO: 830 - protein, 112 aa, Artificial Sequence
  Synthetic
MIPRGLSEAKPATPEIQEIVDKVKPQLEEKTNETYGKLEAVQYKTQVLAVHGDHTRAWSTNYYIKVRAGDNKYMHLKVFNGPRYASSYWEWADRVLTGYQVDKNKDDELTGF

SEQ ID NO: 831 - protein, 112 aa, Artificial Sequence
  Synthetic
MIPRGLSEAKPATPEIQEIVDKVKPQLEEKTNETYGKLEAVQYKTQVLADWQKRGRSWSTNYYIKVRAGDNKYMHLKVFNGPNQSGVVVQVADRVLTGYQVDKNKDDELTGF

SEQ ID NO: 832 - protein, 112 aa, Artificial Sequence
  Synthetic
MIPRGLSEAKPATPEIQEIVDKVKPQLEEKTNETYGKLEAVQYKTQVLAYNWERFRKVSTNYYIKVRAGDNKYMHLKVFNGPYHNHQHTIHADRVLTGYQVDKNKDDELTGF

SEQ ID NO: 833 - protein, 112 aa, Artificial Sequence
  Synthetic
MIPRGLSEAKPATPEIQEIVDKVKPQLEEKTNETYGKLEAVQYKTQVLAGWSRNVWFWSTNYYIKVRAGDNKYMHLKVFNGPKQELGTKTTADRVLTGYQVDKNKDDELTGF

SEQ ID NO: 834 - protein, 112 aa, Artificial Sequence
  Synthetic
MIPRGLSEAKPATPEIQEIVDKVKPQLEEKTNETYGKLEAVQYKTQVLASQTQHRRHHSTNYYIKVRAGDNKYMHLKVFNGPLVPQHHQHQADRVLTGYQVDKNKDDELTGF

SEQ ID NO: 835 - protein, 112 aa, Artificial Sequence
  Synthetic
MIPRGLSEAKPATPEIQEIVDKVKPQLEEKTNETYGKLEAVQYKTQVLAPNVKHKHRWSTNYYIKVRAGDNKYMHLKVFNGPWHDIAGGHYADRVLTGYQVDKNKDDELTGF

SEQ ID NO: 836 - protein, 112 aa, Artificial Sequence
  Synthetic
MIPRGLSEAKPATPEIQEIVDKVKPQLEEKTNETYGKLEAVQYKTQVLAKHPAFHQHSSTNYYIKVRAGDNKYMHLKVFNGPRHDLHYHYPADRVLTGYQVDKNKDDELTGF

SEQ ID NO: 837 - protein, 112 aa, Artificial Sequence
  Synthetic
MIPRGLSEAKPATPEIQEIVDKVKPQLEEKTNETYGKLEAVQYKTQVLAPHHHTDWRTSTNYYIKVRAGDNKYMHLKVFNGPYWHWKVRRFADRVLTGYQVDKNKDDELTGF

SEQ ID NO: 838 - protein, 112 aa, Artificial Sequence
  Synthetic
MIPRGLSEAKPATPEIQEIVDKVKPQLEEKTNETYGKLEAVQYKTQVLAHTHKILHFHSTNYYIKVRAGDNKYMHLKVFNGPDKQRYEDKQADRVLTGYQVDKNKDDELTGF

SEQ ID NO: 839 - protein, 112 aa, Artificial Sequence
  Synthetic
MIPRGLSEAKPATPEIQEIVDKVKPQLEEKTNETYGKLEAVQYKTQVLAPNHHFFLQFSTNYYIKVRAGDNKYMHLKVFNGPQHHHPHRHPADRVLTGYQVDKNKDDELTGF

SEQ ID NO: 840 - protein, 112 aa, Artificial Sequence
  Synthetic
MIPRGLSEAKPATPEIQEIVDKVKPQLEEKTNETYGKLEAVQYKTQVLARRYIGHNYSSTNYYIKVRAGDNKYMHLKVFNGPWHHFHNSYDADRVLTGYQVDKNKDDELTGF

SEQ ID NO: 841 - protein, 112 aa, Artificial Sequence
  Synthetic
MIPRGLSEAKPATPEIQEIVDKVKPQLEEKTNETYGKLEAVQYKTQVLATHYHHQWDPSTNYYIKVRAGDNKYMHLKVFNGPIWYSHRPRAADRVLTGYQVDKNKDDELTGF

SEQ ID NO: 842 - protein, 111 aa, Artificial Sequence
  Synthetic
MIPRGLSEAKPATPEIQEIVDKVKPQLEEKTNETYGKLEAVQYKTQVLADKKHGQYKSTNYYIKVRAGDNKYMHLKVFNGPWDDHTLKWYADRVLTGYQVDKNKDDELTGF

SEQ ID NO: 843 - protein, 112 aa, Artificial Sequence
  Synthetic
MIPRGLSEAKPATPEIQEIVDKVKPQLEEKTNETYGKLEAVQYKTQVLAYHIQGVYWRSTNYYIKVRAGDNKYMHLKVFNGPIAFWGPKRFADRVLTGYQVDKNKDDELTGF

SEQ ID NO: 844 - protein, 112 aa, Artificial Sequence
  Synthetic
MIPRGLSEAKPATPEIQEIVDKVKPQLEEKTNETYGKLEAVQYKTQVLASRFKHHVRNSTNYYIKVRAGDNKYMHLKVFNGPFPHRNKSDGADRVLTGYQVDKNKDDELTGF

SEQ ID NO: 845 - protein, 112 aa, Artificial Sequence
  Synthetic
MIPRGLSEAKPATPEIQEIVDKVKPQLEEKTNETYGKLEAVQYKTQVLAWHHQHHLLASTNYYIKVRAGDNKYMHLKVFNGPFKRSQQWEWADRVLTGYQVDKNKDDELTGF

SEQ ID NO: 846 - protein, 112 aa, Artificial Sequence
  Synthetic
MIPRGLSEAKPATPEIQEIVDKVKPQLEEKTNETYGKLEAVQYKTQVLAHNKHPSPRVSTNYYIKVRAGDNKYMHLKVFNGPKHRYQPTHWADRVLTGYQVDKNKDDELTGF

SEQ ID NO: 847 - protein, 112 aa, Artificial Sequence
  Synthetic
MIPRGLSEAKPATPEIQEIVDKVKPQLEEKTNETYGKLEAVQYKTQVLATWFHQHEQQSTNYYIKVRAGDNKYMHLKVFNGPYHDIWAWHVADRVLTGYQVDKNKDDELTGF

SEQ ID NO: 848 - protein, 112 aa, Artificial Sequence
  Synthetic
MIPRGLSEAKPATPEIQEIVDKVKPQLEEKTNETYGKLEAVQYKTQVLAWKEWRYHHQSTNYYIKVRAGDNKYMHLKVFNGPDFVKHHLHDADRVLTGYQVDKNKDDELTGF

SEQ ID NO: 849 - protein, 112 aa, Artificial Sequence
  Synthetic
MIPRGLSEAKPATPEIQEIVDKVKPQLEEKTNETYGKLEAVQYKTQVLAFTKHWDRWYSTNYYIKVRAGDNKYMHLKVFNGPISDHVHFGWADRVLTGYQVDKNKDDELTGF

SEQ ID NO: 850 - protein, 112 aa, Artificial Sequence
  Synthetic
MIPRGLSEAKPATPEIQEIVDKVKPQLEEKTNETYGKLEAVQYKTQVLATRLYDHSVWSTNYYIKVRAGDNKYMHLKVFNGPYHHRDHWGWADRVLTGYQVDKNKDDELTGF

SEQ ID NO: 851 - protein, 112 aa, Artificial Sequence
  Synthetic
MIPRGLSEAKPATPEIQEIVDKVKPQLEEKTNETYGKLEAVQYKTQVLAWEYQTHHPASTNYYIKVRAGDNKYMHLKVFNGPEWFTVGGIAADRVLTGYQVDKNKDDELTGF

SEQ ID NO: 852 - protein, 112 aa, Artificial Sequence
  Synthetic
MIPRGLSEAKPATPEIQEIVDKVKPQLEEKTNETYGKLEAVQYKTQVLAVHFRSHRDFSTNYYIKVRAGDNKYMHLKVFNGPERKHAHQHPADRVLTGYQVDKNKDDELTGF

SEQ ID NO: 853 - protein, 112 aa, Artificial Sequence
  Synthetic
MIPRGLSEAKPATPEIQEIVDKVKPQLEEKTNETYGKLEAVQYKTQVLASRHTHHHRSSTNYYIKVRAGDNKYMHLKVFNGPDSNLYNEWNADRVLTGYQVDKNKDDELTGF

SEQ ID NO: 854 - protein, 112 aa, Artificial Sequence
  Synthetic
MIPRGLSEAKPATPEIQEIVDKVKPQLEEKTNETYGKLEAVQYKTQVLATARYEHAPTSTNYYIKVRAGDNKYMHLKVFNGPTAKHSHKKHADRVLTGYQVDKNKDDELTGF

SEQ ID NO: 855 - protein, 112 aa, Artificial Sequence
  Synthetic
MIPRGLSEAKPATPEIQEIVDKVKPQLEEKTNETYGKLEAVQYKTQVLARHRKESWYVSTNYYIKVRAGDNKYMHLKVFNGPNWPHGIDPKADRVLTGYQVDKNKDDELTGF

SEQ ID NO: 856 - protein, 112 aa, Artificial Sequence
  Synthetic
MIPRGLSEAKPATPEIQEIVDKVKPQLEEKTNETYGKLEAVQYKTQVLADHGYARGHHSTNYYIKVRAGDNKYMHLKVFNGPKHIHEHKSEADRVLTGYQVDKNKDDELTGF

SEQ ID NO: 857 - protein, 112 aa, Artificial Sequence
  Synthetic
MIPRGLSEAKPATPEIQEIVDKVKPQLEEKTNETYGKLEAVQYKTQVLATPHKIWHWHSTNYYIKVRAGDNKYMHLKVFNGPTKKFHQHERADRVLTGYQVDKNKDDELTGF

SEQ ID NO: 858 - protein, 112 aa, Artificial Sequence
  Synthetic
MIPRGLSEAKPATPEIQEIVDKVKPQLEEKTNETYGKLEAVQYKTQVLASYAQHTRLHSTNYYIKVRAGDNKYMHLKVFNGPTRHHQHYYLADRVLTGYQVDKNKDDELTGF

SEQ ID NO: 859 - protein, 112 aa, Artificial Sequence
  Synthetic
MIPRGLSEAKPATPEIQEIVDKVKPQLEEKTNETYGKLEAVQYKTQVLAIDHRYHYLHSTNYYIKVRAGDNKYMHLKVFNGPWYWTQHHRWADRVLTGYQVDKNKDDELTGF

SEQ ID NO: 860 - protein, 112 aa, Artificial Sequence
  Synthetic
MIPRGLSEAKPATPEIQEIVDKVKPQLEEKTNETYGKLEAVQYKTQVLAHGYNHRKVQSTNYYIKVRAGDNKYMHLKVFNGPYHVWNWRLKADRVLTGYQVDKNKDDELTGF

SEQ ID NO: 861 - protein, 112 aa, Artificial Sequence
  Synthetic
MIPRGLSEAKPATPEIQEIVDKVKPQLEEKTNETYGKLEAVQYKTQVLAGHLKAAPWHSTNYYIKVRAGDNKYMHLKVFNGPFHHFRPHHHADRVLTGYQVDKNKDDELTGF

SEQ ID NO: 862 - protein, 112 aa, Artificial Sequence
  Synthetic
MIPRGLSEAKPATPEIQEIVDKVKPQLEEKTNETYGKLEAVQYKTQVLAKEKYASWERSTNYYIKVRAGDNKYMHLKVFNGPFLNGKKRHVADRVLTGYQVDKNKDDELTGF

SEQ ID NO: 863 - protein, 112 aa, Artificial Sequence
  Synthetic
MIPRGLSEAKPATPEIQEIVDKVKPQLEEKTNETYGKLEAVQYKTQVLAKGHPHAHPHSTNYYIKVRAGDNKYMHLKVFNGPWWKIHGSTVADRVLTGYQVDKNKDDELTGF

SEQ ID NO: 864 - protein, 112 aa, Artificial Sequence
  Synthetic
MIPRGLSEAKPATPEIQEIVDKVKPQLEEKTNETYGKLEAVQYKTQVLAPYRRHEHHQSTNYYIKVRAGDNKYMHLKVFNGPNSDFHHNQQADRVLTGYQVDKNKDDELTGF

SEQ ID NO: 865 - protein, 112 aa, Artificial Sequence
  Synthetic
MIPRGLSEAKPATPEIQEIVDKVKPQLEEKTNETYGKLEAVQYKTQVLAGFPHWFVHNSTNYYIKVRAGDNKYMHLKVFNGPTHHLRYHHQADRVLTGYQVDKNKDDELTGF

SEQ ID NO: 866 - protein, 112 aa, Artificial Sequence
  Synthetic
MIPRGLSEAKPATPEIQEIVDKVKPQLEEKTNETYGKLEAVQYKTQVLAFRRYQSFHYSTNYYIKVRAGDNKYMHLKVFNGPFYKYHQVRWADRVLTGYQVDKNKDDELTGF

SEQ ID NO: 867 - protein, 112 aa, Artificial Sequence
  Synthetic
MIPRGLSEAKPATPEIQEIVDKVKPQLEEKTNETYGKLEAVQYKTQVLAPRYRHHVDYSTNYYIKVRAGDNKYMHLKVFNGPYSFRDHHWWADRVLTGYQVDKNKDDELTGF

SEQ ID NO: 868 - protein, 112 aa, Artificial Sequence
  Synthetic
MIPRGLSEAKPATPEIQEIVDKVKPQLEEKTNETYGKLEAVQYKTQVLADYLKRNFRYSTNYYIKVRAGDNKYMHLKVFNGPPFYRNHHHEADRVLTGYQVDKNKDDELTGF

SEQ ID NO: 869 - protein, 112 aa, Artificial Sequence
  Synthetic
MIPRGLSEAKPATPEIQEIVDKVKPQLEEKTNETYGKLEAVQYKTQVLARSHPGKHVHSTNYYIKVRAGDNKYMHLKVFNGPFQLNLRWGQADRVLTGYQVDKNKDDELTGF

SEQ ID NO: 870 - protein, 112 aa, Artificial Sequence
  Synthetic
MIPRGLSEAKPATPEIQEIVDKVKPQLEEKTNETYGKLEAVQYKTQVLAHHHRWAKWLSTNYYIKVRAGDNKYMHLKVFNGPVHNFHDIRHADRVLTGYQVDKNKDDELTGF

SEQ ID NO: 871 - protein, 112 aa, Artificial Sequence
  Synthetic
MIPRGLSEAKPATPEIQEIVDKVKPQLEEKTNETYGKLEAVQYKTQVLAAAHHNHWHISTNYYIKVRAGDNKYMHLKVFNGPAQHGHVPFSADRVLTGYQVDKNKDDELTGF

SEQ ID NO: 872 - protein, 112 aa, Artificial Sequence
  Synthetic
MIPRGLSEAKPATPEIQEIVDKVKPQLEEKTNETYGKLEAVQYKTQVLAPVQKHAGSHSTNYYIKVRAGDNKYMHLKVFNGPPWHNAEIKHADRVLTGYQVDKNKDDELTGF

SEQ ID NO: 873 - protein, 112 aa, Artificial Sequence
  Synthetic
MIPRGLSEAKPATPEIQEIVDKVKPQLEEKTNETYGKLEAVQYKTQVLADNWRHWRIWSTNYYIKVRAGDNKYMHLKVFNGPAGWSSNKADADRVLTGYQVDKNKDDELTGF

SEQ ID NO: 874 - protein, 111 aa, Artificial Sequence
  Synthetic
MIPRGLSEAKPATPEIQEIVDKVKPQLEEKTNETYGKLEAVQYKTQVLAPRHHHWAFSTNYYIKVRAGDNKYMHLKVFNGPKRQHHDVGQADRVLTGYQVDKNKDDELTGF

SEQ ID NO: 875 - protein, 112 aa, Artificial Sequence
  Synthetic
MIPRGLSEAKPATPEIQEIVDKVKPQLEEKTNETYGKLEAVQYKTQVLAVSYDDITWVSTNYYIKVRAGDNKYMHLKVFNGPNSSYGWLWWADRVLTGYQVDKNKDDELTGF

SEQ ID NO: 876 - protein, 112 aa, Artificial Sequence
  Synthetic
MIPRGLSEAKPATPEIQEIVDKVKPQLEEKTNETYGKLEAVQYKTQVLAPPHPRVQHYSTNYYIKVRAGDNKYMHLKVFNGPAFRDHRAPHADRVLTGYQVDKNKDDELTGF

SEQ ID NO: 877 - protein, 112 aa, Artificial Sequence
  Synthetic
MIPRGLSEAKPATPEIQEIVDKVKPQLEEKTNETYGKLEAVQYKTQVLAKQFRHHQHESTNYYIKVRAGDNKYMHLKVFNGPKWWSTQGIVADRVLTGYQVDKNKDDELTGF

SEQ ID NO: 878 - protein, 112 aa, Artificial Sequence
  Synthetic
MIPRGLSEAKPATPEIQEIVDKVKPQLEEKTNETYGKLEAVQYKTQVLAEHHEYHYRYSTNYYIKVRAGDNKYMHLKVFNGPFRPVHHIRIADRVLTGYQVDKNKDDELTGF

SEQ ID NO: 879 - protein, 111 aa, Artificial Sequence
  Synthetic
MIPRGLSEAKPATPEIQEIVDKVKPQLEEKTNETYGKLEAVQYKTQVLAHHHHRQHPSTNYYIKVRAGDNKYMHLKVFNGPKVGQGVNLGADRVLTGYQVDKNKDDELTGF

SEQ ID NO: 880 - protein, 112 aa, Artificial Sequence
  Synthetic
MIPRGLSEAKPATPEIQEIVDKVKPQLEEKTNETYGKLEAVQYKTQVLAKLHQAHHWHSTNYYIKVRAGDNKYMHLKVFNGPEWSNKHYQWADRVLTGYQVDKNKDDELTGF

SEQ ID NO: 881 - protein, 112 aa, Artificial Sequence
  Synthetic
MIPRGLSEAKPATPEIQEIVDKVKPQLEEKTNETYGKLEAVQYKTQVLAEYHHYGTSRSTNYYIKVRAGDNKYMHLKVFNGPRQLKHHTNFADRVLTGYQVDKNKDDELTGF

SEQ ID NO: 882 - protein, 112 aa, Artificial Sequence
  Synthetic
MIPRGLSEAKPATPEIQEIVDKVKPQLEEKTNETYGKLEAVQYKTQVLADNKHIPQRQSTNYYIKVRAGDNKYMHLKVFNGPRNHVAEKYWADRVLTGYQVDKNKDDELTGF

SEQ ID NO: 883 - protein, 112 aa, Artificial Sequence
  Synthetic
MIPRGLSEAKPATPEIQEIVDKVKPQLEEKTNETYGKLEAVQYKTQVLAHKQWQWTIVSTNYYIKVRAGDNKYMHLKVFNGPAYKSDKIRKADRVLTGYQVDKNKDDELTGF

SEQ ID NO: 884 - protein, 112 aa, Artificial Sequence
  Synthetic
MIPRGLSEAKPATPEIQEIVDKVKPQLEEKTNETYGKLEAVQYKTQVLAYRIGHGVQHSTNYYIKVRAGDNKYMHLKVFNGPYDKPYIVWIADRVLTGYQVDKNKDDELTGF

SEQ ID NO: 885 - protein, 112 aa, Artificial Sequence
  Synthetic
MIPRGLSEAKPATPEIQEIVDKVKPQLEEKTNETYGKLEAVQYKTQVLADQVRRIPHHSTNYYIKVRAGDNKYMHLKVFNGPHDKHPQSWAADRVLTGYQVDKNKDDELTGF

SEQ ID NO: 886 - protein, 112 aa, Artificial Sequence
  Synthetic
MIPRGLSEAKPATPEIQEIVDKVKPQLEEKTNETYGKLEAVQYKTQVLAEGKHEFRFQSTNYYIKVRAGDNKYMHLKVFNGPWDKHRQHLWADRVLTGYQVDKNKDDELTGF

SEQ ID NO: 887 - protein, 112 aa, Artificial Sequence
  Synthetic
MIPRGLSEAKPATPEIQEIVDKVKPQLEEKTNETYGKLEAVQYKTQVLAHYWGRWYKISTNYYIKVRAGDNKYMHLKVFNGPFHAFWHLAYADRVLTGYQVDKNKDDELTGF

SEQ ID NO: 888 - DNA, 336 bp, Artificial Sequence
  Synthetic
atgatcccgcgtggcctgtctgaagctaaaccagcaactccggaaattcaagagatcgtcgataaggtgaaaccgcagctggaagagaaaacgaacgaaacctacggtaagctggaagcggtccagtacaaaacccaagtgctagcacatgttatcgatcataaataccgtcattccaccaactattacattaaggttcgtgccggtgacaataagtatatgcacctgaaagtgttcaacggcccgaaaaaagttaaccatcattaccataaagcggaccgtgttctgaccggttaccaggttgacaagaacaaagatgacgagctgacgggtttc

SEQ ID NO: 889 - DNA, 336 bp, Artificial Sequence
  Synthetic
atgatcccgcgtggcctgtctgaagctaaaccagcaactccggaaattcaagagatcgtcgataaggtgaaaccgcagctggaagagaaaacgaacgaaacctacggtaagctggaagcggtccagtacaaaacccaagtgctagcactgaaaggtcataaacatcataaaacctccaccaactattacattaaggttcgtgccggtgacaataagtatatgcacctgaaagtgttcaacggcccgtggcaggcaaaacataaagatggtaaagcggaccgtgttctgaccggttaccaggttgacaagaacaaagatgacgagctgacgggtttc

SEQ ID NO: 890 - DNA, 336 bp, Artificial Sequence
  Synthetic
atgatcccgcgtggcctgtctgaagctaaaccagcaactccggaaattcaagagatcgtcgataaggtgaaaccgcagctggaagagaaaacgaacgaaacctacggtaagctggaagcggtccagtacaaaacccaagtgctagcacataaccatcataaatacccacatggttccaccaactattacattaaggttcgtgccggtgacaataagtatatgcacctgaaagtgttcaacggcccgatctggtctaaacataactggcattgggcggaccgtgttctgaccggttaccaggttgacaagaacaaagatgacgagctgacgggtttc

SEQ ID NO: 891 - DNA, 336 bp, Artificial Sequence
  Synthetic
atgatcccgcgtggcctgtctgaagctaaaccagcaactccggaaattcaagagatcgtcgataaggtgaaaccgcagctggaagagaaaacgaacgaaacctacggtaagctggaagcggtccagtacaaaacccaagtgctagcagttcataaaaaacatcataaatggttttccaccaactattacattaaggttcgtgccggtgacaataagtatatgcacctgaaagtgttcaacggcccgaaatggcaggttgcacgtcatgataacgcggaccgtgttctgaccggttaccaggttgacaagaacaaagatgacgagctgacgggtttc

SEQ ID NO: 892 - DNA, 336 bp, Artificial Sequence
  Synthetic
atgatcccgcgtggcctgtctgaagctaaaccagcaactccggaaattcaagagatcgtcgataaggtgaaaccgcagctggaagagaaaacgaacgaaacctacggtaagctggaagcggtccagtacaaaacccaagtgctagcaaaacgtcatgcagatcatccacgtgtttccaccaactattacattaaggttcgtgccggtgacaataagtatatgcacctgaaagtgttcaacggcccggcacataactacaccctggtttggtacgcggaccgtgttctgaccggttaccaggttgacaagaacaaagatgacgagctgacgggtttc

SEQ ID NO: 893 - DNA, 336 bp, Artificial Sequence
  Synthetic
atgatcccgcgtggcctgtctgaagctaaaccagcaactccggaaattcaagagatcgtcgataaggtgaaaccgcagctggaagagaaaacgaacgaaacctacggtaagctggaagcggtccagtacaaaacccaagtgctagcacagcagccaaaacagcatggttttcattccaccaactattacattaaggttcgtgccggtgacaataagtatatgcacctgaaagtgttcaacggcccgtcttctggtaacaaacataaacatcatgcggaccgtgttctgaccggttaccaggttgacaagaacaaagatgacgagctgacgggtttc

SEQ ID NO: 894 - DNA, 336 bp, Artificial Sequence
  Synthetic
atgatcccgcgtggcctgtctgaagctaaaccagcaactccggaaattcaagagatcgtcgataaggtgaaaccgcagctggaagagaaaacgaacgaaacctacggtaagctggaagcggtccagtacaaaacccaagtgctagcacatcatggtcatcgtacccattctgtttccaccaactattacattaaggttcgtgccggtgacaataagtatatgcacctgaaagtgttcaacggcccggtttgggcacatcataaaaaatactacgcggaccgtgttctgaccggttaccaggttgacaagaacaaagatgacgagctgacgggtttc

SEQ ID NO: 895 - DNA, 333 bp, Artificial Sequence
  Synthetic
atgatcccgcgtggcctgtctgaagctaaaccagcaactccggaaattcaagagatcgtcgataaggtgaaaccgcagctggaagagaaaacgaacgaaacctacggtaagctggaagcggtccagtacaaaacccaagtgctagcaaaacagcatcattgggatgttcatcgttccaccaactattacattaaggttcgtgccggtgacaataagtatatgcacctgaaagtgttcaacggcccgaaagttaaacatacccgtatccatgcggaccgtgttctgaccggttaccaggttgacaagaacaaagatgacgagctgacgggtttc

SEQ ID NO: 896 - DNA, 336 bp, Artificial Sequence
  Synthetic
atgatcccgcgtggcctgtctgaagctaaaccagcaactccggaaattcaagagatcgtcgataaggtgaaaccgcagctggaagagaaaacgaacgaaacctacggtaagctggaagcggtccagtacaaaacccaagtgctagcaggtggtcagccagcaaaacagcatttttccaccaactattacattaaggttcgtgccggtgacaataagtatatgcacctgaaagtgttcaacggcccgccaaacaaacatcatcatgcacataaagcggaccgtgttctgaccggttaccaggttgacaagaacaaagatgacgagctgacgggtttc

SEQ ID NO: 897 - DNA, 336 bp, Artificial Sequence
  Synthetic
atgatcccgcgtggcctgtctgaagctaaaccagcaactccggaaattcaagagatcgtcgataaggtgaaaccgcagctggaagagaaaacgaacgaaacctacggtaagctggaagcggtccagtacaaaacccaagtgctagcaaaccatgttcgttggaaagatcatgattccaccaactattacattaaggttcgtgccggtgacaataagtatatgcacctgaaagtgttcaacggcccgtttatcaaacgttacaaactgcagcgtgcggaccgtgttctgaccggttaccaggttgacaagaacaaagatgacgagctgacgggtttc

SEQ ID NO: 898 - DNA, 336 bp, Artificial Sequence
  Synthetic
atgatcccgcgtggcctgtctgaagctaaaccagcaactccggaaattcaagagatcgtcgataaggtgaaaccgcagctggaagagaaaacgaacgaaacctacggtaagctggaagcggtccagtacaaaacccaagtgctagcacattctcatcatccagaacattggtactccaccaactattacattaaggttcgtgccggtgacaataagtatatgcacctgaaagtgttcaacggcccgcgtaaagattggcatgttcgtaaactggcggaccgtgttctgaccggttaccaggttgacaagaacaaagatgacgagctgacgggtttc

SEQ ID NO: 899 - DNA, 336 bp, Artificial Sequence
  Synthetic
atgatcccgcgtggcctgtctgaagctaaaccagcaactccggaaattcaagagatcgtcgataaggtgaaaccgcagctggaagagaaaacgaacgaaacctacggtaagctggaagcggtccagtacaaaacccaagtgctagcaaaagttaaaacccatgatcatcagcgttccaccaactattacattaaggttcgtgccggtgacaataagtatatgcacctgaaagtgttcaacggcccgatccatcagcatcattctcaggattgggcggaccgtgttctgaccggttaccaggttgacaagaacaaagatgacgagctgacgggtttc

SEQ ID NO: 900 - DNA, 336 bp, Artificial Sequence
  Synthetic
atgatcccgcgtggcctgtctgaagctaaaccagcaactccggaaattcaagagatcgtcgataaggtgaaaccgcagctggaagagaaaacgaacgaaacctacggtaagctggaagcggtccagtacaaaacccaagtgctagcataccgtgaagtttctaaacgtcgtacctccaccaactattacattaaggttcgtgccggtgacaataagtatatgcacctgaaagtgttcaacggcccgaaccagaaacagggtcataaacataaagcggaccgtgttctgaccggttaccaggttgacaagaacaaagatgacgagctgacgggtttc

SEQ ID NO: 901 - DNA, 336 bp, Artificial Sequence
  Synthetic
atgatcccgcgtggcctgtctgaagctaaaccagcaactccggaaattcaagagatcgtcgataaggtgaaaccgcagctggaagagaaaacgaacgaaacctacggtaagctggaagcggtccagtacaaaacccaagtgctagcagttaccaaacgtgcatggctgaaaatctccaccaactattacattaaggttcgtgccggtgacaataagtatatgcacctgaaagtgttcaacggcccgttttacgcacagaaacgtacctcttacgcggaccgtgttctgaccggttaccaggttgacaagaacaaagatgacgagctgacgggtttc

SEQ ID NO: 902 - DNA, 336 bp, Artificial Sequence
  Synthetic
atgatcccgcgtggcctgtctgaagctaaaccagcaactccggaaattcaagagatcgtcgataaggtgaaaccgcagctggaagagaaaacgaacgaaacctacggtaagctggaagcggtccagtacaaaacccaagtgctagcacataaccatcgtcattactctaaaggttccaccaactattacattaaggttcgtgccggtgacaataagtatatgcacctgaaagtgttcaacggcccggcatttaacgatggtgcagtttttatcgcggaccgtgttctgaccggttaccaggttgacaagaacaaagatgacgagctgacgggtttc

SEQ ID NO: 903 - DNA, 336 bp, Artificial Sequence
  Synthetic
atgatcccgcgtggcctgtctgaagctaaaccagcaactccggaaattcaagagatcgtcgataaggtgaaaccgcagctggaagagaaaacgaacgaaacctacggtaagctggaagcggtccagtacaaaacccaagtgctagcaaaacatcatcatcataaacatcagcattccaccaactattacattaaggttcgtgccggtgacaataagtatatgcacctgaaagtgttcaacggcccggtttttctgcataacgaatctcatcaggcggaccgtgttctgaccggttaccaggttgacaagaacaaagatgacgagctgacgggtttc

SEQ ID NO: 904 - DNA, 336 bp, Artificial Sequence
  Synthetic
atgatcccgcgtggcctgtctgaagctaaaccagcaactccggaaattcaagagatcgtcgataaggtgaaaccgcagctggaagagaaaacgaacgaaacctacggtaagctggaagcggtccagtacaaaacccaagtgctagcacatccacatcatgttcgttcttctgtttccaccaactattacattaaggttcgtgccggtgacaataagtatatgcacctgaaagtgttcaacggcccgaaaggtcattttcatacccatctggttgcggaccgtgttctgaccggttaccaggttgacaagaacaaagatgacgagctgacgggtttc

SEQ ID NO: 905 - DNA, 336 bp, Artificial Sequence
  Synthetic
atgatcccgcgtggcctgtctgaagctaaaccagcaactccggaaattcaagagatcgtcgataaggtgaaaccgcagctggaagagaaaacgaacgaaacctacggtaagctggaagcggtccagtacaaaacccaagtgctagcagaaaccccacatgaacgtcataaaacctccaccaactattacattaaggttcgtgccggtgacaataagtatatgcacctgaaagtgttcaacggcccgaaacgttggctgaaacatcatgcacatgcggaccgtgttctgaccggttaccaggttgacaagaacaaagatgacgagctgacgggtttc

SEQ ID NO: 906 - DNA, 336 bp, Artificial Sequence
  Synthetic
atgatcccgcgtggcctgtctgaagctaaaccagcaactccggaaattcaagagatcgtcgataaggtgaaaccgcagctggaagagaaaacgaacgaaacctacggtaagctggaagcggtccagtacaaaacccaagtgctagcaggtaccatccagcatgttaaccagcattccaccaactattacattaaggttcgtgccggtgacaataagtatatgcacctgaaagtgttcaacggcccgtacggtcataaacatcattttcattgggcggaccgtgttctgaccggttaccaggttgacaagaacaaagatgacgagctgacgggtttc

SEQ ID NO: 907 - DNA, 336 bp, Artificial Sequence
  Synthetic
atgatcccgcgtggcctgtctgaagctaaaccagcaactccggaaattcaagagatcgtcgataaggtgaaaccgcagctggaagagaaaacgaacgaaacctacggtaagctggaagcggtccagtacaaaacccaagtgctagcatacaacgttggtcgtaaaaaacatcgttccaccaactattacattaaggttcgtgccggtgacaataagtatatgcacctgaaagtgttcaacggcccggttcatttttttcatgatcagtctgaagcggaccgtgttctgaccggttaccaggttgacaagaacaaagatgacgagctgacgggtttc

SEQ ID NO: 908 - DNA, 336 bp, Artificial Sequence
  Synthetic
atgatcccgcgtggcctgtctgaagctaaaccagcaactccggaaattcaagagatcgtcgataaggtgaaaccgcagctggaagagaaaacgaacgaaacctacggtaagctggaagcggtccagtacaaaacccaagtgctagcacgtcgtggtccacagaaatcttcttactccaccaactattacattaaggttcgtgccggtgacaataagtatatgcacctgaaagtgttcaacggcccgcagaaaaaaaaccgtcatcatcagaaagcggaccgtgttctgaccggttaccaggttgacaagaacaaagatgacgagctgacgggtttc

SEQ ID NO: 909 - DNA, 336 bp, Artificial Sequence
  Synthetic
atgatcccgcgtggcctgtctgaagctaaaccagcaactccggaaattcaagagatcgtcgataaggtgaaaccgcagctggaagagaaaacgaacgaaacctacggtaagctggaagcggtccagtacaaaacccaagtgctagcacatgatcgtcatcagaaacattggcgttccaccaactattacattaaggttcgtgccggtgacaataagtatatgcacctgaaagtgttcaacggcccggatctgcgtaaacataaatggaaatctgcggaccgtgttctgaccggttaccaggttgacaagaacaaagatgacgagctgacgggtttc

SEQ ID NO: 910 - DNA, 336 bp, Artificial Sequence
  Synthetic
atgatcccgcgtggcctgtctgaagctaaaccagcaactccggaaattcaagagatcgtcgataaggtgaaaccgcagctggaagagaaaacgaacgaaacctacggtaagctggaagcggtccagtacaaaacccaagtgctagcaatcccacatcatcataaaccacgtgtttccaccaactattacattaaggttcgtgccggtgacaataagtatatgcacctgaaagtgttcaacggcccgtcttttcatcatcatcgtcattctgatgcggaccgtgttctgaccggttaccaggttgacaagaacaaagatgacgagctgacgggtttc

SEQ ID NO: 911 - DNA, 336 bp, Artificial Sequence
  Synthetic
atgatcccgcgtggcctgtctgaagctaaaccagcaactccggaaattcaagagatcgtcgataaggtgaaaccgcagctggaagagaaaacgaacgaaacctacggtaagctggaagcggtccagtacaaaacccaagtgctagcaaaaggtaaacattaccattctcagcagtccaccaactattacattaaggttcgtgccggtgacaataagtatatgcacctgaaagtgttcaacggcccggaattttaccagggtcattggaccaacgcggaccgtgttctgaccggttaccaggttgacaagaacaaagatgacgagctgacgggtttc

SEQ ID NO: 912 - DNA, 336 bp, Artificial Sequence
  Synthetic
atgatcccgcgtggcctgtctgaagctaaaccagcaactccggaaattcaagagatcgtcgataaggtgaaaccgcagctggaagagaaaacgaacgaaacctacggtaagctggaagcggtccagtacaaaacccaagtgctagcacataaacataaacatcatcataccaactccaccaactattacattaaggttcgtgccggtgacaataagtatatgcacctgaaagtgttcaacggcccggttggtcatcattggtggctgaaagaagcggaccgtgttctgaccggttaccaggttgacaagaacaaagatgacgagctgacgggtttc

SEQ ID NO: 913 - DNA, 336 bp, Artificial Sequence
  Synthetic
atgatcccgcgtggcctgtctgaagctaaaccagcaactccggaaattcaagagatcgtcgataaggtgaaaccgcagctggaagagaaaacgaacgaaacctacggtaagctggaagcggtccagtacaaaacccaagtgctagcaggtcgtcataaacatatccaggttcattccaccaactattacattaaggttcgtgccggtgacaataagtatatgcacctgaaagtgttcaacggcccggttggtaccaaacatctgcgtcagtctgcggaccgtgttctgaccggttaccaggttgacaagaacaaagatgacgagctgacgggtttc

SEQ ID NO: 914 - DNA, 336 bp, Artificial Sequence
  Synthetic
atgatcccgcgtggcctgtctgaagctaaaccagcaactccggaaattcaagagatcgtcgataaggtgaaaccgcagctggaagagaaaacgaacgaaacctacggtaagctggaagcggtccagtacaaaacccaagtgctagcaccacatcagcataaactgcatgcacattccaccaactattacattaaggttcgtgccggtgacaataagtatatgcacctgaaagtgttcaacggcccgaaacgtcgtcgtcatccatctcgtggtgcggaccgtgttctgaccggttaccaggttgacaagaacaaagatgacgagctgacgggtttc

SEQ ID NO: 915 - DNA, 336 bp, Artificial Sequence
  Synthetic
atgatcccgcgtggcctgtctgaagctaaaccagcaactccggaaattcaagagatcgtcgataaggtgaaaccgcagctggaagagaaaacgaacgaaacctacggtaagctggaagcggtccagtacaaaacccaagtgctagcacgtcgtgatcatgtttggcataaaggttccaccaactattacattaaggttcgtgccggtgacaataagtatatgcacctgaaagtgttcaacggcccgaaccatgttcataacaaacatatccatgcggaccgtgttctgaccggttaccaggttgacaagaacaaagatgacgagctgacgggtttc

SEQ ID NO: 916 - DNA, 336 bp, Artificial Sequence
  Synthetic
atgatcccgcgtggcctgtctgaagctaaaccagcaactccggaaattcaagagatcgtcgataaggtgaaaccgcagctggaagagaaaacgaacgaaacctacggtaagctggaagcggtccagtacaaaacccaagtgctagcatctcatcgttctcatgcagatcgtcgttccaccaactattacattaaggttcgtgccggtgacaataagtatatgcacctgaaagtgttcaacggcccgacccagtctcatccacatcgtcattacgcggaccgtgttctgaccggttaccaggttgacaagaacaaagatgacgagctgacgggtttc

SEQ ID NO: 917 - DNA, 336 bp, Artificial Sequence
  Synthetic
atgatcccgcgtggcctgtctgaagctaaaccagcaactccggaaattcaagagatcgtcgataaggtgaaaccgcagctggaagagaaaacgaacgaaacctacggtaagctggaagcggtccagtacaaaacccaagtgctagcatcttctcagaacggttaccagggtcattccaccaactattacattaaggttcgtgccggtgacaataagtatatgcacctgaaagtgttcaacggcccgtaccgtcatcatcatcattggcattttgcggaccgtgttctgaccggttaccaggttgacaagaacaaagatgacgagctgacgggtttc

SEQ ID NO: 918 - DNA, 336 bp, Artificial Sequence
  Synthetic
atgatcccgcgtggcctgtctgaagctaaaccagcaactccggaaattcaagagatcgtcgataaggtgaaaccgcagctggaagagaaaacgaacgaaacctacggtaagctggaagcggtccagtacaaaacccaagtgctagcaaccgaaggtggtaaaaaactgcgtcgttccaccaactattacattaaggttcgtgccggtgacaataagtatatgcacctgaaagtgttcaacggcccggaatggacccatggtaaagaaaaccatgcggaccgtgttctgaccggttaccaggttgacaagaacaaagatgacgagctgacgggtttc

SEQ ID NO: 919 - DNA, 336 bp, Artificial Sequence
  Synthetic
atgatcccgcgtggcctgtctgaagctaaaccagcaactccggaaattcaagagatcgtcgataaggtgaaaccgcagctggaagagaaaacgaacgaaacctacggtaagctggaagcggtccagtacaaaacccaagtgctagcaaaagcacgtcatcatcagggtcatgcatccaccaactattacattaaggttcgtgccggtgacaataagtatatgcacctgaaagtgttcaacggcccgtggtaccagtttgatggtgtttcttttgcggaccgtgttctgaccggttaccaggttgacaagaacaaagatgacgagctgacgggtttc

SEQ ID NO: 920 - DNA, 336 bp, Artificial Sequence
  Synthetic
atgatcccgcgtggcctgtctgaagctaaaccagcaactccggaaattcaagagatcgtcgataaggtgaaaccgcagctggaagagaaaacgaacgaaacctacggtaagctggaagcggtccagtacaaaacccaagtgctagcaaaccattctcagggtcgtcatcatatctccaccaactattacattaaggttcgtgccggtgacaataagtatatgcacctgaaagtgttcaacggcccgaaaaaagttcgtcatgaatacgcatgggcggaccgtgttctgaccggttaccaggttgacaagaacaaagatgacgagctgacgggtttc

SEQ ID NO: 921 - DNA, 336 bp, Artificial Sequence
  Synthetic
atgatcccgcgtggcctgtctgaagctaaaccagcaactccggaaattcaagagatcgtcgataaggtgaaaccgcagctggaagagaaaacgaacgaaacctacggtaagctggaagcggtccagtacaaaacccaagtgctagcaaaatactggaaagcagattggtactggtccaccaactattacattaaggttcgtgccggtgacaataagtatatgcacctgaaagtgttcaacggcccggaacattcttggtggcgtcgtggtcatgcggaccgtgttctgaccggttaccaggttgacaagaacaaagatgacgagctgacgggtttc

SEQ ID NO: 922 - DNA, 336 bp, Artificial Sequence
  Synthetic
atgatcccgcgtggcctgtctgaagctaaaccagcaactccggaaattcaagagatcgtcgataaggtgaaaccgcagctggaagagaaaacgaacgaaacctacggtaagctggaagcggtccagtacaaaacccaagtgctagcacatcgtcagtacccaccaggtccacattccaccaactattacattaaggttcgtgccggtgacaataagtatatgcacctgaaagtgttcaacggcccgtaccattttcatcattactacaaacatgcggaccgtgttctgaccggttaccaggttgacaagaacaaagatgacgagctgacgggtttc

SEQ ID NO: 923 - DNA, 336 bp, Artificial Sequence
  Synthetic
atgatcccgcgtggcctgtctgaagctaaaccagcaactccggaaattcaagagatcgtcgataaggtgaaaccgcagctggaagagaaaacgaacgaaacctacggtaagctggaagcggtccagtacaaaacccaagtgctagcacgtcagcatcatcatttttaccgtacctccaccaactattacattaaggttcgtgccggtgacaataagtatatgcacctgaaagtgttcaacggcccgtggcagaactttcatgatccatttgatgcggaccgtgttctgaccggttaccaggttgacaagaacaaagatgacgagctgacgggtttc

SEQ ID NO: 924 - DNA, 336 bp, Artificial Sequence
  Synthetic
atgatcccgcgtggcctgtctgaagctaaaccagcaactccggaaattcaagagatcgtcgataaggtgaaaccgcagctggaagagaaaacgaacgaaacctacggtaagctggaagcggtccagtacaaaacccaagtgctagcaccacagcagcatcagccagatccaacctccaccaactattacattaaggttcgtgccggtgacaataagtatatgcacctgaaagtgttcaacggcccggcacgtcagcatcatcatcattctcatgcggaccgtgttctgaccggttaccaggttgacaagaacaaagatgacgagctgacgggtttc

SEQ ID NO: 925 - DNA, 336 bp, Artificial Sequence
  Synthetic
atgatcccgcgtggcctgtctgaagctaaaccagcaactccggaaattcaagagatcgtcgataaggtgaaaccgcagctggaagagaaaacgaacgaaacctacggtaagctggaagcggtccagtacaaaacccaagtgctagcactgtcttttaacaactaccattggcattccaccaactattacattaaggttcgtgccggtgacaataagtatatgcacctgaaagtgttcaacggcccgaaactgcgtcatgataaactgacccatgcggaccgtgttctgaccggttaccaggttgacaagaacaaagatgacgagctgacgggtttc

SEQ ID NO: 926 - DNA, 336 bp, Artificial Sequence
  Synthetic
atgatcccgcgtggcctgtctgaagctaaaccagcaactccggaaattcaagagatcgtcgataaggtgaaaccgcagctggaagagaaaacgaacgaaacctacggtaagctggaagcggtccagtacaaaacccaagtgctagcacatcattctaaacatcatcatctgcattccaccaactattacattaaggttcgtgccggtgacaataagtatatgcacctgaaagtgttcaacggcccgaaccataaatttcagtcttaccagccagcggaccgtgttctgaccggttaccaggttgacaagaacaaagatgacgagctgacgggtttc

SEQ ID NO: 927 - DNA, 336 bp, Artificial Sequence
  Synthetic
atgatcccgcgtggcctgtctgaagctaaaccagcaactccggaaattcaagagatcgtcgataaggtgaaaccgcagctggaagagaaaacgaacgaaacctacggtaagctggaagcggtccagtacaaaacccaagtgctagcacataaatacgatcgtcattcttttaaatccaccaactattacattaaggttcgtgccggtgacaataagtatatgcacctgaaagtgttcaacggcccgggtaaacattctggtgcacgtcataaagcggaccgtgttctgaccggttaccaggttgacaagaacaaagatgacgagctgacgggtttc

SEQ ID NO: 928 - DNA, 336 bp, Artificial Sequence
  Synthetic
atgatcccgcgtggcctgtctgaagctaaaccagcaactccggaaattcaagagatcgtcgataaggtgaaaccgcagctggaagagaaaacgaacgaaacctacggtaagctggaagcggtccagtacaaaacccaagtgctagcaaaacattctcgtcatcatcatgcacagtacaccaactattacattaaggttcgtgccggtgacaataagtatatgcacctgaaagtgttcaacggcccgaacatccatcatgaaggtaaaatcccagcggaccgtgttctgaccggttaccaggttgacaagaacaaagatgacgagctgacgggtttc

SEQ ID NO: 929 - DNA, 336 bp, Artificial Sequence
  Synthetic
atgatcccgcgtggcctgtctgaagctaaaccagcaactccggaaattcaagagatcgtcgataaggtgaaaccgcagctggaagagaaaacgaacgaaacctacggtaagctggaagcggtccagtacaaaacccaagtgctagcacgtcatcatcattctcattttcatctgtccaccaactattacattaaggttcgtgccggtgacaataagtatatgcacctgaaagtgttcaacggcccgatccgtcagtcttcttacaaagttcatgcggaccgtgttctgaccggttaccaggttgacaagaacaaagatgacgagctgacgggtttc

SEQ ID NO: 930 - DNA, 336 bp, Artificial Sequence
  Synthetic
atgatcccgcgtggcctgtctgaagctaaaccagcaactccggaaattcaagagatcgtcgataaggtgaaaccgcagctggaagagaaaacgaacgaaacctacggtaagctggaagcggtccagtacaaaacccaagtgctagcacgtaaccatcgtcatccacatggtcagtccaccaactattacattaaggttcgtgccggtgacaataagtatatgcacctgaaagtgttcaacggcccggttcagcatcgttggtctctgcattgggcggaccgtgttctgaccggttaccaggttgacaagaacaaagatgacgagctgacgggtttc

SEQ ID NO: 931 - DNA, 336 bp, Artificial Sequence
  Synthetic
atgatcccgcgtggcctgtctgaagctaaaccagcaactccggaaattcaagagatcgtcgataaggtgaaaccgcagctggaagagaaaacgaacgaaacctacggtaagctggaagcggtccagtacaaaacccaagtgctagcaggtcatgttgaacaggttcattttccatacaccaactattacattaaggttcgtgccggtgacaataagtatatgcacctgaaagtgttcaacggcccgggtcataaacatcatcatcattggtctgcggaccgtgttctgaccggttaccaggttgacaagaacaaagatgacgagctgacgggtttc

SEQ ID NO: 932 - DNA, 336 bp, Artificial Sequence
  Synthetic
atgatcccgcgtggcctgtctgaagctaaaccagcaactccggaaattcaagagatcgtcgataaggtgaaaccgcagctggaagagaaaacgaacgaaacctacggtaagctggaagcggtccagtacaaaacccaagtgctagcagaaccacataaacatcattaccatctgtccaccaactattacattaaggttcgtgccggtgacaataagtatatgcacctgaaagtgttcaacggcccggttccaggtcagcagccaatcaaaaacgcggaccgtgttctgaccggttaccaggttgacaagaacaaagatgacgagctgacgggtttc

SEQ ID NO: 933 - DNA, 336 bp, Artificial Sequence
  Synthetic
atgatcccgcgtggcctgtctgaagctaaaccagcaactccggaaattcaagagatcgtcgataaggtgaaaccgcagctggaagagaaaacgaacgaaacctacggtaagctggaagcggtccagtacaaaacccaagtgctagcatggaaaaaacataactggaaatacaaatccaccaactattacattaaggttcgtgccggtgacaataagtatatgcacctgaaagtgttcaacggcccgtgggcagcaaaacgtgattggcgtaacgcggaccgtgttctgaccggttaccaggttgacaagaacaaagatgacgagctgacgggtttc

SEQ ID NO: 934 - DNA, 336 bp, Artificial Sequence
  Synthetic
atgatcccgcgtggcctgtctgaagctaaaccagcaactccggaaattcaagagatcgtcgataaggtgaaaccgcagctggaagagaaaacgaacgaaacctacggtaagctggaagcggtccagtacaaaacccaagtgctagcaatccatcatcatacctggggtctgaaatccaccaactattacattaaggttcgtgccggtgacaataagtatatgcacctgaaagtgttcaacggcccgtacggtgatcagccatttaaacgtcatgcggaccgtgttctgaccggttaccaggttgacaagaacaaagatgacgagctgacgggtttc

SEQ ID NO: 935 - DNA, 336 bp, Artificial Sequence
  Synthetic
atgatcccgcgtggcctgtctgaagctaaaccagcaactccggaaattcaagagatcgtcgataaggtgaaaccgcagctggaagagaaaacgaacgaaacctacggtaagctggaagcggtccagtacaaaacccaagtgctagcaaaaccaaaataccatcatcatgatatctccaccaactattacattaaggttcgtgccggtgacaataagtatatgcacctgaaagtgttcaacggcccgggtcatcatgcaaaaccacatcgttgggcggaccgtgttctgaccggttaccaggttgacaagaacaaagatgacgagctgacgggtttc

SEQ ID NO: 936 - DNA, 336 bp, Artificial Sequence
  Synthetic
atgatcccgcgtggcctgtctgaagctaaaccagcaactccggaaattcaagagatcgtcgataaggtgaaaccgcagctggaagagaaaacgaacgaaacctacggtaagctggaagcggtccagtacaaaacccaagtgctagcacagtactggcattctcatgaaacctggtccaccaactattacattaaggttcgtgccggtgacaataagtatatgcacctgaaagtgttcaacggcccgtttctgaaagttcgtaccatccgttctgcggaccgtgttctgaccggttaccaggttgacaagaacaaagatgacgagctgacgggtttc

SEQ ID NO: 937 - DNA, 336 bp, Artificial Sequence
  Synthetic
atgatcccgcgtggcctgtctgaagctaaaccagcaactccggaaattcaagagatcgtcgataaggtgaaaccgcagctggaagagaaaacgaacgaaacctacggtaagctggaagcggtccagtacaaaacccaagtgctagcacgtaaacagtaccatctgccatggacctccaccaactattacattaaggttcgtgccggtgacaataagtatatgcacctgaaagtgttcaacggcccgctgtctcagtttcagacccatctgtgggcggaccgtgttctgaccggttaccaggttgacaagaacgaagatgacgagctgacgggtttc

SEQ ID NO: 938 - DNA, 336 bp, Artificial Sequence
  Synthetic
atgatcccgcgtggcctgtctgaagctaaaccagcaactccggaaattcaagagatcgtcgataaggtgaaaccgcagctggaagagaaaacgaacgaaacctacggtaagctggaagcggtccagtacaaaacccaagtgctagcagcaatccattgggcacattacatcctgtccaccaactattacattaaggttcgtgccggtgacaataagtatatgcacctgaaagtgttcaacggcccggttctgtggcgttactactacccaaaagcggaccgtgttctgaccggttaccaggttgacaagaacaaagatgacgagctgacgggtttc

SEQ ID NO: 939 - DNA, 333 bp, Artificial Sequence
  Synthetic
atgatcccgcgtggcctgtctgaagctaaaccagcaactccggaaattcaagagatcgtcgataaggtgaaaccgcagctggaagagaaaacgaacgaaacctacggtaagctggaagcggtccagtacaaaacccaagtgctagcagattggcgtaaactgaccctgttttccaccaactattacattaaggttcgtgccggtgacaataagtatatgcacctgaaagtgttcaacggcccgcatcatcagcattggcatgtttttccagcggaccgtgttctgaccggttaccaggttgacaagaacaaagatgacgagctgacgggtttc

SEQ ID NO: 940 - DNA, 339 bp, Artificial Sequence
  Synthetic
atgatcccgcgtggcctgtctgaagctaaaccagcaactccggaaattcaagagatcgtcgataaggtgaaaccgcagctggaagagaaaacgaacgaaacctacggtaagctggaagcggtccagtacaaaacccaagtgctagcaaccaaatctcataaatttgcataccattccaccaactattacattaaggttcgtgccggtgacaataagtatatgcacctgaaagtgttcaacggcccgatcgttcaggaattttctctggatcagtgggcggaccgtgttctgaccggttaccaggttgacaagaacaaagatgacgagctgacgggtttc

SEQ ID NO: 941 - DNA, 336 bp, Artificial Sequence
  Synthetic
atgatcccgcgtggcctgtctgaagctaaaccagcaactccggaaattcaagagatcgtcgataaggtgaaaccgcagctggaagagaaaacgaacgaaacctacggtaagctggaagcggtccagtacaaaacccaagtgctagcatctaaatacgttcattggcataaattttccaccaactattacattaaggttcgtgccggtgacaataagtatatgcacctgaaagtgttcaacggcccgtggaaaatcaacaacctgtaccatgaagcggaccgtgttctgaccggttaccaggttgacaagaacaaagatgacgagctgacgggtttc

SEQ ID NO: 942 - DNA, 336 bp, Artificial Sequence
  Synthetic
atgatcccgcgtggcctgtctgaagctaaaccagcaactccggaaattcaagagatcgtcgataaggtgaaaccgcagctggaagagaaaacgaacgaaacctacggtaagctggaagcggtccagtacaaaacccaagtgctagcaaaagaacaggcagcatgggttctgcattccaccaactattacattaaggttcgtgccggtgacaataagtatatgcacctgaaagtgttcaacggcccgtttcattacctgcatcatacccgttctgcggaccgtgttctgaccggttaccaggttgacaagaacaaagatgacgagctgacgggtttc

SEQ ID NO: 943 - DNA, 336 bp, Artificial Sequence
  Synthetic
atgatcccgcgtggcctgtctgaagctaaaccagcaactccggaaattcaagagatcgtcgataaggtgaaaccgcagctggaagagaaaacgaacgaaacctacggtaagctggaagcggtccagtacaaaacccaagtgctagcacatctgcaggcaccacgtaacgcatactccaccaactattacattaaggttcgtgccggtgacaataagtatatgcacctgaaagtgttcaacggcccgaaaggttggcgtaacacccatcataaagcggaccgtgttctgaccggttaccaggttgacaagaacaaagatgacgagctgacgggtttc

SEQ ID NO: 944 - DNA, 336 bp, Artificial Sequence
  Synthetic
atgatcccgcgtggcctgtctgaagctaaaccagcaactccggaaattcaagagatcgtcgataaggtgaaaccgcagctggaagagaaaacgaacgaaacctacggtaagctggaagcggtccagtacaaaacccaagtgctagcaggtctgacccatcgttggcgtccacattccaccaactattacattaaggttcgtgccggtgacaataagtatatgcacctgaaagtgttcaacggcccgatctggtctgcacgttctgataaactggcggaccgtgttctgaccggttaccaggttgacaagaacaaagatgacgagctgacgggtttc

SEQ ID NO: 945 - DNA, 336 bp, Artificial Sequence
  Synthetic
atgatcccgcgtggcctgtctgaagctaaaccagcaactccggaaattcaagagatcgtcgataaggtgaaaccgcagctggaagagaaaacgaacgaaacctacggtaagctggaagcggtccagtacaaaacccaagtgctagcatctcatcatcgtgcaaccgatcaggtttccaccaactattacattaaggttcgtgccggtgacaataagtatatgcacctgaaagtgttcaacggcccgaaagcataccatacctactggcatcatgcggaccgtgttctgaccggttaccaggttgacaagaacaaagatgacgagctgacgggtttc

SEQ ID NO: 946 - DNA, 336 bp, Artificial Sequence
  Synthetic
atgatcccgcgtggcctgtctgaagctaaaccagcaactccggaaattcaagagatcgtcgataaggtgaaaccgcagctggaagagaaaacgaacgaaacctacggtaagctggaagcggtccagtacaaaacccaagtgctagcaaacaaatggcatatccgttttgcaacctccaccaactattacattaaggttcgtgccggtgacaataagtatatgcacctgaaagtgttcaacggcccgtttgcacaggcacatcatcatacccaggcggaccgtgttctgaccggttaccaggttgacaagaacaaagatgacgagctgacgggtttc

SEQ ID NO: 947 - DNA, 336 bp, Artificial Sequence
  Synthetic
atgatcccgcgtggcctgtctgaagctaaaccagcaactccggaaattcaagagatcgtcgataaggtgaaaccgcagctggaagagaaaacgaacgaaacctacggtaagctggaagcggtccagtacaaaacccaagtgctagcacatatccgtgattctctgtggatcacctccaccaactattacattaaggttcgtgccggtgacaataagtatatgcacctgaaagtgttcaacggcccgaactggcagtggatcccacattgggcagcggaccgtgttctgaccggttaccaggttgacaagaacaaagatgacgagctgacgggtttc

SEQ ID NO: 948 - DNA, 336 bp, Artificial Sequence
  Synthetic
atgatcccgcgtggcctgtctgaagctaaaccagcaactccggaaattcaagagatcgtcgataaggtgaaaccgcagctggaagagaaaacgaacgaaacctacggtaagctggaagcggtccagtacaaaacccaagtgctagcataccatatctctctgtcttttcgtgaatccaccaactattacattaaggttcgtgccggtgacaataagtatatgcacctgaaagtgttcaacggcccgaaactggataccctgggtcagcagcgtgcggaccgtgttctgaccggttaccaggttgacaagaacaaagatgacgagctgacgggtttc

SEQ ID NO: 949 - DNA, 336 bp, Artificial Sequence
  Synthetic
atgatcccgcgtggcctgtctgaagctaaaccagcaactccggaaattcaagagatcgtcgataaggtgaaaccgcagctggaagagaaaacgaacgaaacctacggtaagctggaagcggtccagtacaaaacccaagtgctagcaatccattgggcaggtttttttcgtggttccaccaactattacattaaggttcgtgccggtgacaataagtatatgcacctgaaagtgttcaacggcccgtgggaatgggaacgtcattggctggcagcggaccgtgttctgaccggttaccaggttgacaagaacaaagatgacgagctgacgggtttc

SEQ ID NO: 950 - DNA, 336 bp, Artificial Sequence
  Synthetic
atgatcccgcgtggcctgtctgaagctaaaccagcaactccggaaattcaagagatcgtcgataaggtgaaaccgcagctggaagagaaaacgaacgaaacctacggtaagctggaagcggtccagtacaaaacccaagtgctagcatactactctgaacgtcatttttacaaatccaccaactattacattaaggttcgtgccggtgacaataagtatatgcacctgaaagtgttcaacggcccgtttaccctgggtcgtgaaggttggtttgcggaccgtgttctgaccggttaccaggttgacaagaacaaagatgacgagctgacgggtttc

SEQ ID NO: 951 - DNA, 336 bp, Artificial Sequence
  Synthetic
atgatcccgcgtggcctgtctgaagctaaaccagcaactccggaaattcaagagatcgtcgataaggtgaaaccgcagctggaagagaaaacgaacgaaacctacggtaagctggaagcggtccagtacaaaacccaagtgctagcacgtcagcagcaggttcatgttccatcttccaccaactattacattaaggttcgtgccggtgacaataagtatatgcacctgaaagtgttcaacggcccgtaccgtggtaacacctttaaaatctgggcggaccgtgttctgaccggttaccaggttgacaagaacaaagatgacgagctgacgggtttc

SEQ ID NO: 952 - DNA, 336 bp, Artificial Sequence
  Synthetic
atgatcccgcgtggcctgtctgaagctaaaccagcaactccggaaattcaagagatcgtcgataaggtgaaaccgcagctggaagagaaaacgaacgaaacctacggtaagctggaagcggtccagtacaaaacccaagtgctagcaaccaaaaaaaaccagctgcagggtcattccaccaactattacattaaggttcgtgccggtgacaataagtatatgcacctgaaagtgttcaacggcccggttcattctctgctgcagcatcatgatgcggaccgtgttctgaccggttaccaggttgacaagaacaaagatgacgagctgacgggtttc

SEQ ID NO: 953 - DNA, 336 bp, Artificial Sequence
  Synthetic
atgatcccgcgtggcctgtctgaagctaaaccagcaactccggaaattcaagagatcgtcgataaggtgaaaccgcagctggaagagaaaacgaacgaaacctacggtaagctggaagcggtccagtacaaaacccaagtgctagcacgtgatatccatcatcatcatcattggtccaccaactattacattaaggttcgtgccggtgacaataagtatatgcacctgaaagtgttcaacggcccgtacatcaaacgtcattggtctaactttgcggaccgtgttctgaccggttaccaggttgacaagaacaaagatgacgagctgacgggtttc

SEQ ID NO: 954 - DNA, 336 bp, Artificial Sequence
  Synthetic
atgatcccgcgtggcctgtctgaagctaaaccagcaactccggaaattcaagagatcgtcgataaggtgaaaccgcagctggaagagaaaacgaacgaaacctacggtaagctggaagcggtccagtacaaaacccaagtgctagcacagcgtcagtacaccaccaaggttctgtccaccaactattacattaaggttcgtgccggtgacaataagtatatgcacctgaaagtgttcaacggcccggataacgaacgtaaccaggttgaatctgcggaccgtgttctgaccggttaccaggttgacaagaacaaagatgacgagctgacgggtttc

SEQ ID NO: 955 - DNA, 336 bp, Artificial Sequence
  Synthetic
atgatcccgcgtggcctgtctgaagctaaaccagcaactccggaaattcaagagatcgtcgataaggtgaaaccgcagctggaagagaaaacgaacgaaacctacggtaagctggaagcggtccagtacaaaacccaagtgctagcatactgggattggcgttttgttgaatggtccaccaactattacattaaggttcgtgccggtgacaataagtatatgcacctgaaagtgttcaacggcccgatcggttacgaactgtttaccgttaaagcggaccgtgttctgaccggttaccaggttgacaagaacaaagatgacgagctgacgggtttc

SEQ ID NO: 956 - DNA, 336 bp, Artificial Sequence
  Synthetic
atgatcccgcgtggcctgtctgaagctaaaccagcaactccggaaattcaagagatcgtcgataaggtgaaaccgcagctggaagagaaaacgaacgaaacctacggtaagctggaagcggtccagtacaaaacccaagtgctagcaggtttttctaaaccatttaaatggtactccaccaactattacattaaggttcgtgccggtgacaataagtatatgcacctgaaagtgttcaacggcccgtaccgtgcatggatccattggacctctgcggaccgtgttctgaccggttaccaggttgacaagaacaaagatgacgagcttacgggtttc

SEQ ID NO: 957 - DNA, 336 bp, Artificial Sequence
  Synthetic
atgatcccgcgtggcctgtctgaagctaaaccagcaactccggaaattcaagagatcgtcgataaggtgaaaccgcagctggaagagaaaacgaacgaaacctacggtaagctggaagcggtccagtacaaaacccaagtgctagcaatctttcaggaacgtctggcaggtcagtccaccaactattacattaaggttcgtgccggtgacaataagtatatgcacctgaaagtgttcaacggcccgcagatcaaacattctcatcatgcatgggcggaccgtgttctgaccggttaccaggttgacaagaacaaagatgacgagctgacgggtttc

SEQ ID NO: 958 - DNA, 336 bp, Artificial Sequence
  Synthetic
atgatcccgcgtggcctgtctgaagctaaaccagcaactccggaaattcaagagatcgtcgataaggtgaaaccgcagctggaagagaaaacgaacgaaacctacggtaagctggaagcggtccagtacaaaacccaagtgctagcaaaatacgatcatcatacccagtctctgtccaccaactattacattaaggttcgtgccggtgacaataagtatatgcacctgaaagtgttcaacggcccggtttacgcatggtactgggataaatgggcggaccgtgttctgaccggttaccaggttgacaagaacaaagatgacgagctgacgggtttc

SEQ ID NO: 959 - DNA, 336 bp, Artificial Sequence
  Synthetic
atgatcccgcgtggcctgtctgaagctaaaccagcaactccggaaattcaagagatcgtcgataaggtgaaaccgcagctggaagagaaaacgaacgaaacctacggtaagctggaagcggtccagtacaaaacccaagtgctagcaaaacatgcacataccccatttggtccatccaccaactattacattaaggttcgtgccggtgacaataagtatatgcacctgaaagtgttcaacggcccggcagtttggtgggatggtcgtggttgggcggaccgtgttctgaccggttaccaggttgacaagaacaaagatgacgagctgacgggtttc

SEQ ID NO: 960 - DNA, 336 bp, Artificial Sequence
  Synthetic
atgatcccgcgtggcctgtctgaagctaaaccagcaactccggaaattcaagagatcgtcgataaggtgaaaccgcagctggaagagaaaacgaacgaaacctacggtaagctggaagcggtccagtacaaaacccaagtgctagcatctctgtctcgttggctgtgggcagaatccaccaactattacattaaggttcgtgccggtgacaataagtatatgcacctgaaagtgttcaacggcccgtggcatacccataaacattaccagaaagcggaccgtgttctgaccggttaccaggttgacaagaacaaagatgacgagctgacgggtttc

SEQ ID NO: 961 - DNA, 336 bp, Artificial Sequence
  Synthetic
atgatcccgcgtggcctgtctgaagctaaaccagcaactccggaaattcaagagatcgtcgataaggtgaaaccgcagctggaagagaaaacgaacgaaacctacggtaagctggaagcggtccagtacaaaacccaagtgctagcacatcagcagcatacccagcgttaccgttccaccaactattacattaaggttcgtgccggtgacaataagtatatgcacctgaaagtgttcaacggcccggcaaaactgcagtttggtcataaacatgcggaccgtgttctgaccggttaccaggttgacaagaacaaagatgacgagctgacgggtttc

SEQ ID NO: 962 - DNA, 330 bp, Artificial Sequence
  Synthetic
atgatcccgcgtggcctgtctgaagctaaaccagcaactccggaaattcaagagatcgtcgataaggtgaaaccgcagctggaagagaaaacgaacgaaacctacggtaagctggaagcggtccagtacaaaacccaagtgctagcacataccatctctcagcatgtttccaccaactattacattaaggttcgtgccggtgacaataagtatatgcacctgaaagtgttcaacggcccgccaatctcttttcgttggcatcgttttgcggaccgtgttctgaccggttaccaggttgacaagaacaaagatgacgagctgacgggtttc

SEQ ID NO: 963 - DNA, 336 bp, Artificial Sequence
  Synthetic
atgatcccgcgtggcctgtctgaagctaaaccagcaactccggaaattcaagagatcgtcgataaggtgaaaccgcagctggaagagaaaacgaacgaaacctacggtaagctggaagcggtccagtacaaaacccaagtgctagcagatcagtggacctgggcacattctcgttccaccaactattacattaaggttcgtgccggtgacaataagtatatgcacctgaaagtgttcaacggcccggattaccatctgcgtcatcataaccatgcggaccgtgttctgaccggttaccaggttgacaagaacaaagatgacgagctgacgggtttc

SEQ ID NO: 964 - DNA, 336 bp, Artificial Sequence
  Synthetic
atgatcccgcgtggcctgtctgaagctaaaccagcaactccggaaattcaagagatcgtcgataaggtgaaaccgcagctggaagagaaaacgaacgaaacctacggtaagctggaagcggtccagtacaaaacccaagtgctagcatggtaccgtgtttggcgttgggtttggtccaccaactattacattaaggttcgtgccggtgacaataagtatatgcacctgaaagtgttcaacggcccggtttacaaatacggttctgaaaactgggcggaccgtgttctgaccggttaccaggttgacaagaacaaagatgacgagctgacgggtttc

SEQ ID NO: 965 - DNA, 336 bp, Artificial Sequence
  Synthetic
atgatcccgcgtggcctgtctgaagctaaaccagcaactccggaaattcaagagatcgtcgataaggtgaaaccgcagctggaagagaaaacgaacgaaacctacggtaagctggaagcggtccagtacaaaacccaagtgctagcacagaaaggttctacccatcataaccattccaccaactattacattaaggttcgtgccggtgacaataagtatatgcacctgaaagtgttcaacggcccggcacgttctcaggcaggtcatcataacgcggaccgtgttctgaccggttaccaggttgacaagaacaaagatgacgagctgacgggtttc

SEQ ID NO: 966 - DNA, 336 bp, Artificial Sequence
  Synthetic
atgatcccgcgtggcctgtctgaagctaaaccagcaactccggaaattcaagagatcgtcgataaggtgaaaccgcagctggaagagaaaacgaacgaaacctacggtaagctggaagcggtccagtacaaaacccaagtgctagcaccagaaggtcgtgcaggtgaaccatcttccaccaactattacattaaggttcgtgccggtgacaataagtatatgcacctgaaagtgttcaacggcccggaacattggtggtttacctttggtgatgcggaccgtgttctgaccggttaccaggttgacaagaacaaagatgacgagctgacgggtttc

SEQ ID NO: 967 - DNA, 336 bp, Artificial Sequence
  Synthetic
atgatcccgcgtggcctgtctgaagctaaaccagcaactccggaaattcaagagatcgtcgataaggtgaaaccgcagctggaagagaaaacgaacgaaacctacggtaagctggaagcggtccagtacaaaacccaagtgctagcacatacccgtcatcatgttaccctgtggtccaccaactattacattaaggttcgtgccggtgacaataagtatatgcacctgaaagttttcaacggcccgggttggaaatacgcaccacaggtttgggcggaccgtgttctgaccggttaccaggttgacaagaacaaagatgacgagctgacgggtttc

SEQ ID NO: 968 - DNA, 336 bp, Artificial Sequence
  Synthetic
atgatcccgcgtggcctgtctgaagctaaaccagcaactccggaaattcaagagatcgtcgataaggtgaaaccgcagctggaagagaaaacgaacgaaacctacggtaagctggaagcggtccagtacaaaacccaagtgctagcacagcggtactacaaacatgaataccgttccaccaactattacattaaggttcgtgccggtgacaataagtatatgcacctgaaagtgttcaacggcccgtactttaaactgccaccatgggaagaagcggaccgtgttctgaccggttaccaggttgacaagaacaaagatgacgagctgacgggtttc

SEQ ID NO: 969 - DNA, 336 bp, Artificial Sequence
  Synthetic
atgatcccgcgtggcctgtctgaagctaaaccagcaactccggaaattcaagagatcgtcgataaggtgaaaccgcagctggaagagaaaacgaacgaaacctacggtaagctggaagcggtccagtacaaaacccaagtgctagcacagtggtttcatcgtcgtgaagttaaatccaccaactattacattaaggttcgtgccggtgacaataagtatatgcacctgaaagtgttcaacggcccgccagttcatctgcatcataaacagcatgcggaccgtgttctgaccggttaccaggttgacaagaacaaagatgacgagctgacgggtttc

SEQ ID NO: 970 - DNA, 336 bp, Artificial Sequence
  Synthetic
atgatcccgcgtggcctgtctgaagctaaaccagcaactccggaaattcaagagatcgtcgataaggtgaaaccgcagctggaagagaaaacgaacgaaacctacggtaagctggaagcggtccagtacaaaacccaagtgctagcacatcatctgcatgcaacccagccaccatccaccaactattacattaaggttcgtgccggtgacaataagtatatgcacctgaaagtgttcaacggcccgaactggcatatcatcaacaaatacgatgcggaccgtgttctgaccggttaccaggttgacaagaacaaagatgacgagctgacgggtttc

SEQ ID NO: 971 - DNA, 330 bp, Artificial Sequence
  Synthetic
atgatcccgcgtggcctgtctgaagctaaaccagcaactccggaaattcaagagatcgtcgataaggtgaaaccgcagctggaagagaaaacgaacgaaacctacggtaagctggaagcggtccagtacaaaacccaagtgctagcaaaacattggcatcagccagttgcaaaatccaccaactattacattaaggttcgtgccggtgacaataagtatatgcacctgaaagtgttcaacggcccggcacattggcatgattgggttgcggaccgtgttctgaccggttaccaggttgacaagaacaaagatgacgagctgacgggtttc

SEQ ID NO: 972 - DNA, 336 bp, Artificial Sequence
  Synthetic
atgatcccgcgtggcctgtctgaagctaaaccagcaactccggaaattcaagagatcgtcgataaggtgaaaccgcagctggaagagaaaacgaacgaaacctacggtaagctggaagcggtccagtacaaaacccaagtgctagcatacaccacctctcattggaccatcggttccaccaactattacattaaggttcgtgccggtgacaataagtatatgcacctgaaagtgttcaacggcccggatcatcatcatgttcagaaatctcatgcggaccgtgttctgaccggttaccaggttgacaagaacaaagatgacgagctgacgggtttc

SEQ ID NO: 973 - DNA, 336 bp, Artificial Sequence
  Synthetic
atgatcccgcgtggcctgtctgaagctaaaccagcaactccggaaattcaagagatcgtcgataaggtgaaaccgcagctggaagagaaaacgaacgaaacctacggtaagctggaagcggtccagtacaaaacccaagtgctagcagaacatcatcatacccagctgtctaactccaccaactattacattaaggttcgtgccggtgacaataagtatatgcacctgaaagtgttcaacggcccgaaattttggcaggttcagcagaaatacgcggaccgtgttctgaccggttaccaggttgacaagaacaaagatgacgagctgacgggtttc

SEQ ID NO: 974 - DNA, 336 bp, Artificial Sequence
  Synthetic
atgatcccgcgtggcctgtctgaagctaaaccagcaactccggaaattcaagagatcgtcgataaggtgaaaccgcagctggaagagaaaacgaacgaaacctacggtaagctggaagcggtccagtacaaaacccaagtgctagcacataaaccacataactctaaacagatctccaccaactattacattaaggttcgtgccggtgacaataagtatatgcacctgaaagtgttcaacggcccgaaaccacgttttaacatccatcatcatgcggaccgtgttctgaccggttaccaggttgacaagaacaaagatgacgagctgacgggtttc

SEQ ID NO: 975 - DNA, 336 bp, Artificial Sequence
  Synthetic
atgatcccgcgtggcctgtctgaagctaaaccagcaactccggaaattcaagagatcgtcgataaggtgaaaccgcagctggaagagaaaacgaacgaaacctacggtaagctggaagcggtccagtacaaaacccaagtgctagcacatcataccaaacatcattctcgttggtccaccaactattacattaaggttcgtgccggtgacaataagtatatgcacctgaaagtgttcaacggcccggttaaccatatctctcatgcaccaatcgcggaccgtgttctgaccggttaccaggttgacaagaacaaagatgacgagctgacgggtttc

SEQ ID NO: 976 - DNA, 336 bp, Artificial Sequence
  Synthetic
atgatcccgcgtggcctgtctgaagctaaaccagcaactccggaaattcaagagatcgtcgataaggtgaaaccgcagctggaagagaaaacgaacgaaacctacggtaagctggaagcggtccagtacaaaacccaagtgctagcatttcatcgtcatcatccaatctggcattccaccaactattacattaaggttcgtgccggtgacaataagtatatgcacctgaaagtgttcaacggcccgctgaaaccatgggaagcagatctgtgggcggaccgtgttctgaccggttaccaggttgacaagaacaaagatgacgagctgacgggtttc

SEQ ID NO: 977 - DNA, 336 bp, Artificial Sequence
  Synthetic
atgatcccgcgtggcctgtctgaagctaaaccagcaactccggaaattcaagagatcgtcgataaggtgaaaccgcagctggaagagaaaacgaacgaaacctacggtaagctggaagcggtccagtacaaaacccaagtgctagcagcacgtgttaccatcgattggaaagcatccaccaactattacattaaggttcgtgccggtgacaataagtatatgcacctgaaagtgttcaacggcccgtacaaatacccaaacatccatccacatgcggaccgtgttctgaccggttaccaggttgacaagaacaaagatgacgagctgacgggtttc

SEQ ID NO: 978 - DNA, 336 bp, Artificial Sequence
  Synthetic
atgatcccgcgtggcctgtctgaagctaaaccagcaactccggaaattcaagagatcgtcgataaggtgaaaccgcagctggaagagaaaacgaacgaaacctacggtaagctggaagcggtccagtacaaaacccaagtgctagcaaaactggaacagcgtcgttctcattactccaccaactattacattaaggttcgtgccggtgacaataagtatatgcacctgaaagtgttcaacggcccgccaaaatctctgtttaactaccagcatgcggaccgtgttctgaccggttaccaggttgacaagaacaaagatgacgagctgacgggtttc

SEQ ID NO: 979 - DNA, 336 bp, Artificial Sequence
  Synthetic
atgatcccgcgtggcctgtctgaagctaaaccagcaactccggaaattcaagagatcgtcgataaggtgaaaccgcagctggaagagaaaacgaacgaaacctacggtaagctggaagcggtccagtacaaaacccaagtgctagcaaacatccatcatgttcatcatcagcagtccaccaactattacattaaggttcgtgccggtgacaataagtatatgcacctgaaagtgttcaacggcccggatggtgaatttcatgttaaacaggttgcggaccgtgttctgaccggttaccaggttgacaagaacaaagatgacgagctgacgggtttc

SEQ ID NO: 980 - DNA, 336 bp, Artificial Sequence
  Synthetic
atgatcccgcgtggcctgtctgaagctaaaccagcaactccggaaattcaagagatcgtcgataaggtgaaaccgcagctggaagagaaaacgaacgaaacctacggtaagctggaagcggtccagtacaaaacccaagtgctagcatctcatcataccatcgcatggtacgtttccaccaactattacattaaggttcgtgccggtgacaataagtatatgcacctgaaagtgttcaacggcccggtttacccaaaacgtcagcaggttgaagcggaccgtgttctgaccggttaccaggttgacaagaacaaagatgacgagctgacgggtttc

SEQ ID NO: 981 - DNA, 336 bp, Artificial Sequence
  Synthetic
atgatcccgcgtggcctgtctgaagctaaaccagcaactccggaaattcaagagatcgtcgataaggtgaaaccgcagctggaagagaaaacgaacgaaacctacggtaagctggaagcggtccagtacaaaacccaagtgctagcacatcatcagccatactacggttggcagtccaccaactattacattaaggttcgtgccggtgacaataagtatatgcacctgaaagtgttcaacggcccgatcatcgatcgttctaaaatcgaaaaagcggaccgtgttctgaccggttaccaggttgacaagaacaaagatgacgagctgacgggtttc

SEQ ID NO: 982 - DNA, 336 bp, Artificial Sequence
  Synthetic
atgatcccgcgtggcctgtctgaagctaaaccagcaactccggaaattcaagagatcgtcgataaggtgaaaccgcagctggaagagaaaacgaacgaaacctacggtaagctggaagcggtccagtacaaaacccaagtgctagcagttcatcgttctcatcatccaatcaaatccaccaactattacattaaggttcgtgccggtgacaataagtatatgcacctgaaagtgttcaacggcccgtctatccattcttcttggaaaaaacaggcggaccgtgttctgaccggttaccaggttgacaagaacaaagatgacgagctgacgggtttc

SEQ ID NO: 983 - DNA, 336 bp, Artificial Sequence
  Synthetic
atgatcccgcgtggcctgtctgaagctaaaccagcaactccggaaattcaagagatcgtcgataaggtgaaaccgcagctggaagagaaaacgaacgaaacctacggtaagctggaagcggtccagtacaaaacccaagtgctagcatggtggtctcagcgtgttaaactgttttccaccaactattacattaaggttcgtgccggtgacaataagtatatgcacctgaaagtgttcaacggcccgaacatccataaaacctgggatcagaccgcggaccgtgttctgaccggttaccaggttgacaagaacaaagatgacgagctgacgggtttc

SEQ ID NO: 984 - DNA, 339 bp, Artificial Sequence
  Synthetic
atgatcccgcgtggcctgtctgaagctaaaccagcaactccggaaattcaagagatcgtcgataaggtgaaaccgcagctggaagagaaaacgaacgaaacctacggtaagctggaagcggtccagtacaaaacccaagtgctagcacattactggaaaccacatgatatccattccaccaactattacattaaggttcgtgccggtgacaataagtatatgcacctgaaagtgttcaacggcccgggtaaagttccatttcatgcatttcataaagcggaccgtgttctgaccggttaccaggttgacaagaacaaagatgacgagctgacgggtttc

SEQ ID NO: 985 - DNA, 336 bp, Artificial Sequence
  Synthetic
atgatcccgcgtggcctgtctgaagctaaaccagcaactccggaaattcaagagatcgtcgataaggtgaaaccgcagctggaagagaaaacgaacgaaacctacggtaagctggaagcggtccagtacaaaacccaagtgctagcaaccaaccagccacgtctgtaccatcagtccaccaactattacattaaggttcgtgccggtgacaataagtatatgcacctgaaagtgttcaacggcccgttttaccgtctgacccatggtcatcgtgcggaccgtgttctgaccggttaccaggttgacaagaacaaagatgacgagctgacgggtttc

SEQ ID NO: 986 - DNA, 339 bp, Artificial Sequence
  Synthetic
atgatcccgcgtggcctgtctgaagctaaaccagcaactccggaaattcaagagatcgtcgataaggtgaaaccgcagctggaagagaaaacgaacgaaacctacggtaagctggaagcggtccagtacaaaacccaagtgctagcatggtctggtaaactgctgaaacatccatccaccaactattacattaaggttcgtgccggtgacaataagtatatgcacctgaaagtgttcaacggcccgcatatcgattacaaaaacggtcgtatctgggcggaccgtgttctgaccggttaccaggttgacaagaacaaagatgacgagctgacgggtttc

SEQ ID NO: 987 - DNA, 336 bp, Artificial Sequence
  Synthetic
atgatcccgcgtggcctgtctgaagctaaaccagcaactccggaaattcaagagatcgtcgataaggtgaaaccgcagctggaagagaaaacgaacgaaacctacggtaagctggaagcggtccagtacaaaacccaagtgctagcacatcgtacctcttgggatcataaaaactccaccaactattacattaaggttcgtgccggtgacaataagtatatgcacctgaaagtgttcaacggcccggtttttcatcatcagcgtggtggtcaggcggaccgtgttctgaccggttaccaggttgacaagaacaaagatgacgagctgacgggtttc

SEQ ID NO: 988 - DNA, 339 bp, Artificial Sequence
  Synthetic
atgatcccgcgtggcctgtctgaagctaaaccagcaactccggaaattcaagagatcgtcgataaggtgaaaccgcagctggaagagaaaacgaacgaaacctacggtaagctggaagcggtccagtacaaaacccaagtgctagcaccacataaacagaaacgtcatttttttaactccaccaactattacattaaggttcgtgccggtgacaataagtatatgcacctgaaagtgttcaacggcccgtggggtcagtctaaaccagcacatgttgcggaccgtgttctgaccggttaccaggttgacaagaacaaagatgacgagctgacgggtttc

SEQ ID NO: 989 - DNA, 336 bp, Artificial Sequence
  Synthetic
atgatcccgcgtggcctgtctgaagctaaaccagcaactccggaaattcaagagatcgtcgataaggtgaaaccgcagctggaagagaaaacgaacgaaacctacggtaagctggaagcggtccagtacaaaacccaagtgctagcacatgatcagcataaacatgattttaaatccaccaactattacattaaggttcgtgccggtgacaataagtatatgcacctgaaagtgttcaacggcccgtttcatcagcgttttccagatcataaagcggaccgtgttctgaccggttaccaggttgacaagaacaaagatgacgagctgacgggtttc

SEQ ID NO: 990 - DNA, 336 bp, Artificial Sequence
  Synthetic
atgatcccgcgtggcctgtctgaagctaaaccagcaactccggaaattcaagagatcgtcgataaggtgaaaccgcagctggaagagaaaacgaacgaaacctacggtaagctggaagcggtccagtacaaaacccaagtgctagcaaaccgtgttgttcatcattttcatcactccaccaactattacattaaggttcgtgccggtgacaataagtatatgcacctgaaagtgttcaaaggcccgatccaggcagcagaaggttacaaacatgcggaccgtgttctgaccggttaccaggttgacaagaacaaagatgacgagctgacgggtttc

SEQ ID NO: 991 - DNA, 336 bp, Artificial Sequence
  Synthetic
atgatcccgcgtggcctgtctgaagctaaaccagcaactccggaaattcaagagatcgtcgataaggtgaaaccgcagctggaagagaaaacgaacgaaacctacggtaagctggaagcggtccagtacaaaacccaagtgctagcatggcataaagcaatccgtcagcagttttccaccaactattacattaaggttcgtgccggtgacaataagtatatgcacctgaaagtgttcaacggcccgtttcattaccagtaccgtcatcagcatgcggaccgtgttctgaccggttaccaggttgacaagaacaaagatgacgagctgacgggtttc

SEQ ID NO: 992 - DNA, 336 bp, Artificial Sequence
  Synthetic
atgatcccgcgtggcctgtctgaagctaaaccagcaactccggaaattcaagagatcgtcgataaggtgaaaccgcagctggaagagaaaacgaacgaaacctacggtaagctggaagcggtccagtacaaaacccaagtgctagcaaccaaagaatggcatcagcatatcaaatccaccaactattacattaaggttcgtgccggtgacaataagtatatgcacctgaaagtgttcaacggcccgaacaaatttctgcatggttttgaagttgcggaccgtgttctgaccggttaccaggttgacaagaacaaagatgacgagctgacgggtttc

SEQ ID NO: 993 - DNA, 336 bp, Artificial Sequence
  Synthetic
atgatcccgcgtggcctgtctgaagctaaaccagcaactccggaaattcaagagatcgtcgataaggtgaaaccgcagctggaagagaaaacgaacgaaacctacggtaagctggaagcggtccagtacaaaacccaagtgctagcatggtaccatacccattttgcaaacgcatccaccaactattacattaaggttcgtgccggtgacaataagtatatgcacctgaaagtgttcaacggcccgtttaaacgtcatcagcatggtcataaagcggaccgtgttctgaccggttaccaggttgacaagaacaaagatgacgagctgacgggtttc

SEQ ID NO: 994 - DNA, 336 bp, Artificial Sequence
  Synthetic
atgatcccgcgtggcctgtctgaagctaaaccagcaactccggaaattcaagagatcgtcgataaggtgaaaccgcagctggaagagaaaacgaacgaaacctacggtaagctggaagcggtccagtacaaaacccaagtgctagcaacccgtgttcataacctgtctgttctgtccaccaactattacattaaggttcgtgccggtgacaataagtatatgcacctgaaagtgttcaacggcccgcattacgatcgtgcacattactttaaagcggaccgtgttctgaccggttaccaggttgacaagaacaaagatgacgagctgacgggtttc

SEQ ID NO: 995 - DNA, 336 bp, Artificial Sequence
  Synthetic
atgatcccgcgtggcctgtctgaagctaaaccagcaactccggaaattcaagagatcgtcgataaggtgaaaccgcagctggaagagaaaacgaacgaaacctacggtaagctggaagcggtccagtacaaaacccaagtgctagcatggaaccagccatactggaccacctactccaccaactattacattaaggttcgtgccggtgacaataagtatatgcacctgaaagtgttcaacggcccgtttcgttggaaatttcatgattacaaagcggaccgtgttctgaccggttaccaggttgacaagaacaaagatgacgagctgacgggtttc

SEQ ID NO: 996 - DNA, 336 bp, Artificial Sequence
  Synthetic
atgatcccgcgtggcctgtctgaagctaaaccagcaactccggaaattcaagagatcgtcgataaggtgaaaccgcagctggaagagaaaacgaacgaaacctacggtaagctggaagcggtccagtacaaaacccaagtgctagcacgtccacataaccgtgattctcatcgttccaccaactattacattaaggttcgtgccggtgacaataagtatatgcacctgaaagtgttcaacggcccggatcgtaaacatcgtaaacattggcatgcggaccgtgttctgaccggttaccaggttgacaagaacaaagatgacgagctgacgggtttc

SEQ ID NO: 997 - DNA, 336 bp, Artificial Sequence
  Synthetic
atgatcccgcgtggcctgtctgaagctaaaccagcaactccggaaattcaagagatcgtcgataaggtgaaaccgcagctggaagagaaaacgaacgaaacctacggtaagctggaagcggtccagtacaaaacccaagtgctagcaggtcatccacgtcatcattggaaatactccaccaactattacattaaggttcgtgccggtgacaataagtatatgcacctgaaagtgttcaacggcccggcaacctacaaataccgtgttgattacgcggaccgtgttctgaccggttaccaggttgacaagaacaaagatgacgagctgacgggtttc

SEQ ID NO: 998 - DNA, 336 bp, Artificial Sequence
  Synthetic
atgatcccgcgtggcctgtctgaagctaaaccagcaactccggaaattcaagagatcgtcgataaggtgaaaccgcagctggaagagaaaacgaacgaaacctacggtaagctggaagcggtccagtacaaaacccaagtgctagcatacccaggtcatcatcatgcacgtgattccaccaactattacattaaggttcgtgccggtgacaataagtatatgcacctgaaagtgttcaacggcccgtacttttaccatcatcattggtttaaagcggaccgtgttctgaccggttaccaggttgacaagaacaaagatgacgagctgacgggtttc

SEQ ID NO: 999 - DNA, 336 bp, Artificial Sequence
  Synthetic
atgatcccgcgtggcctgtctgaagctaaaccagcaactccggaaattcaagagatcgtcgataaggtgaaaccgcagctggaagagaaaacgaacgaaacctacggtaagctggaagcggtccagtacaaaacccaagtgctagcaatcgcaaaacatcatacctggcatcagtccaccaactattacattaaggttcgtgccggtgacaataagtatatgcacctgaaagtgttcaacggcccgtaccgtaaccatcgtcatcatatcgttgcggaccgtgttctgaccggttaccaggttgacaagaacaaagatgacgagctgacgggtttc

SEQ ID NO: 1000 - DNA, 336 bp, Artificial Sequence
  Synthetic
atgatcccgcgtggcctgtctgaagctaaaccagcaactccggaaattcaagagatcgtcgataaggtgaaaccgcagctggaagagaaaacgaacgaaacctacggtaagctggaagcggtccagtacaaaacccaagtgctagcacataaccatggtcattggcattttcgttccaccaactattacattaaggttcgtgccggtgacaataagtatatgcacctgaaagtgttcaacggcccggttcagcatgcacgtcataaacattacgcggaccgtgttctgaccggttaccaggttgacaagaacaaagatgacgagctgacgggtttc

SEQ ID NO: 1001 - DNA, 333 bp, Artificial Sequence
  Synthetic
atgatcccgcgtggcctgtctgaagctaaaccagcaactccggaaattcaagagatcgtcgataaggtgaaaccgcagctggaagagaaaacgaacgaaacctacggtaagctggaagcggtccagtacaaaacccaagtgctagcaaaaaaatttgatcattaccatcagaaatccaccaactattacattaaggttcgtgccggtgacaataagtatatgcacctgaaagtgttcaacggcccgaaagatcgtcatcatcataaccgtgcggaccgtgttctgaccggttaccaggttgacaagaacaaagatgacgagctgacgggtttc

SEQ ID NO: 1002 - DNA, 336 bp, Artificial Sequence
  Synthetic
atgatcccgcgtggcctgtctgaagctaaaccagcaactccggaaattcaagagatcgtcgataaggtgaaaccgcagctggaagagaaaacgaacgaaacctacggtaagctggaagcggtccagtacaaaacccaagtgctagcatctaaagcacatcgtgttgaacataaatccaccaactattacattaaggttcgtgccggtgacaataagtatatgcacctgaaagtgttcaacggcccgaaacagcatcatctgtaccattttaaagcggaccgtgttctgaccggttaccaggttgacaagaacaaagatgacgagctgacgggtttc

SEQ ID NO: 1003 - DNA, 336 bp, Artificial Sequence
  Synthetic
atgatcccgcgtggcctgtctgaagctaaaccagcaactccggaaattcaagagatcgtcgataaggtgaaaccgcagctggaagagaaaacgaacgaaacctacggtaagctggaagcggtccagtacaaaacccaagtgctagcaccaaaaaaacattaccatcatggtatctccaccaactattacattaaggttcgtgccggtgacaataagtatatgcacctgaaagtgttcaacggcccggttaactcttttcaggcacatcgtcatgcggaccgtgttctgaccggttaccaggttgacaagaacaaagatgacgagctgacgggtttc

SEQ ID NO: 1004 - DNA, 336 bp, Artificial Sequence; identical to SEQ ID NO: 1003
  Synthetic

SEQ ID NO: 1005 - DNA, 336 bp, Artificial Sequence
  Synthetic
atgatcccgcgtggcctgtctgaagctaaaccagcaactccggaaattcaagagatcgtcgataaggtgaaaccgcagctggaagagaaaacgaacgaaacctacggtaagctggaagcggtccagtacaaaacccaagtgctagcaccacatcattctcatcatcgtctggaatccaccaactattacattaaggttcgtgccggtgacaataagtatatgcacctgaaagtgttcaacggcccgcagccaacctttcgtcatcattacaccgcggaccgtgttctgaccggttaccaggttgacaagaacaaagatgacgagctgacgggtttc

SEQ ID NO: 1006 - DNA, 336 bp, Artificial Sequence
  Synthetic
atgatcccgcgtggcctgtctgaagctaaaccagcaactccggaaattcaagagatcgtcgataaggtgaaaccgcagctggaagagaaaacgaacgaaacctacggtaagctggaagcggtccagtacaaaacccaagtgctagcacatgttcatcatcatcgtgaaaaaggttccaccaactattacattaaggttcgtgccggtgacaataagtatatgcacctgaaagtgttcaacggcccgtactctaactctcgtgaacgtcagtgggcggaccgtgttctgaccggttaccaggttgacaagaacaaagatgacgagctgacgggtttc

SEQ ID NO: 1007 - DNA, 336 bp, Artificial Sequence
  Synthetic
atgatcccgcgtggcctgtctgaagctaaaccagcaactccggaaattcaagagatcgtcgataaggtgaaaccgcagctggaagagaaaacgaacgaaacctacggtaagctggaagcggtccagtacaaaacccaagtgctagcaaaacataaataccatcataccggtcattccaccaactattacattaaggttcgtgccggtgacaataagtatatgcacctgaaagtgttcaacggcccgggtcagatccataaagttcgttctaccgcggaccgtgttctgaccggttaccaggttgacaagaacaaagatgacgagctgacgggtttc

SEQ ID NO: 1008 - DNA, 336 bp, Artificial Sequence
  Synthetic
atgatcccgcgtggcctgtctgaagctaaaccagcaactccggaaattcaagagatcgtcgataaggtgaaaccgcagctggaagagaaaacgaacgaaacctacggtaagctggaagcggtccagtacaaaacccaagtgctagcaaaatactttgcaccacatgcaccacattccaccaactattacattaaggttcgtgccggtgacaataagtatatgcacctgaaagtgttcaacggcccgcattaccatcatcgtcatcagcattctgcggaccgtgttctgaccggttaccaggttgacaagaacaaagatgacgagctgacgggtttc

SEQ ID NO: 1009 - DNA, 336 bp, Artificial Sequence
  Synthetic
atgatcccgcgtggcctgtctgaagctaaaccagcaactccggaaattcaagagatcgtcgataaggtgaaaccgcagctggaagagaaaacgaacgaaacctacggtaagctggaagcggtccagtacaaaacccaagtgctagcactgcatcatcgtgcacataaacatctgtccaccaactattacattaaggttcgtgccggtgacaataagtatatgcacctgaaagtgttcaacggcccgtactttcatcgtgaacatgaacatcaggcggaccgtgttctgaccggttaccaggttgacaagaacaaagatgacgagctgacgggtttc

SEQ ID NO: 1010 - DNA, 336 bp, Artificial Sequence
  Synthetic
atgatcccgcgtggcctgtctgaagctaaaccagcaactccggaaattcaagagatcgtcgataaggtgaaaccgcagctggaagagaaaacgaacgaaacctacggtaagctggaagcggtccagtacaaaacccaagtgctagcagcacatcatggtcattacggtcgtgcatccaccaactattacattaaggttcgtgccggtgacaataagtatatgcacctgaaagtgttcaacggcccgtggcattaccatcattctcagtggcgtgcggaccgtgttctgaccggttaccaggttgacaagaacaaagatgacgagctgacgggtttc

SEQ ID NO: 1011 - DNA, 336 bp, Artificial Sequence
  Synthetic
atgatcccgcgtggcctgtctgaagctaaaccagcaactccggaaattcaagagatcgtcgataaggtgaaaccgcagctggaagagaaaacgaacgaaacctacggtaagctggaagcggtccagtacaaaacccaagtgctagcaccagaacattactctctgtttaaaccatccaccaactattacattaaggttcgtgccggtgacaataagtatatgcacctgaaagtgttcaacggccctaaacatcatcgtaaacatcgtcattgggcggaccgtgttctgaccggttaccaggttgacaagaacaaagatgacgagctgacgggtttc

SEQ ID NO: 1012 - DNA, 336 bp, Artificial Sequence
  Synthetic
atgatcccgcgtggcctgtctgaagctaaaccagcaactccggaaattcaagagatcgtcgataaggtgaaaccgcagctggaagagaaaacgaacgaaacctacggtaagctggaagcggtccagtacaaaacccaagtgctagcagatcatcgtccacgtcatccaaaacattccaccaactattacattaaggttcgtgccggtgacaataagtatatgcacctgaaagtgttcaacggcccggcacataaacatcatctgggttttaaagcggaccgtgttctgaccggttaccaggttgacaagaacaaagatgacgagctgacgggtttc

SEQ ID NO: 1013 - DNA, 336 bp, Artificial Sequence
  Synthetic
atgatcccgcgtggcctgtctgaagctaaaccagcaactccggaaattcaagagatcgtcgataaggtgaaaccgcagctggaagagaaaacgaacgaaacctacggtaagctggaagcggtccagtacaaaacccaagtgctagcaaaacatgaagttcatcatcatggtaactccaccaactattacattaaggttcgtgccggtgacaataagtatatgcacctgaaagtgttcaacggcccgtggcatcgtcatggttctggttttcgtgcggaccgtgttctgaccggttaccaggttgacaagaacaaagatgacgagctgacgggtttc

SEQ ID NO: 1014 - DNA, 336 bp, Artificial Sequence
  Synthetic
atgatcccgcgtggcctgtctgaagctaaaccagcaactccggaaattcaagagatcgtcgataaggtgaaaccgcagctggaagagaaaacgaacgaaacctacggtaagctggaagcggtccagtacaaaacccaagtgctagcaaaatctcaccatcataaacatcgtgaatccaccaactattacattaaggttcgtgccggtgacaataagtatatgcacctgaaagtgttcaacggcccggttgatcgttttctgcatgttaaaaaagcggaccgtgttctgaccggttaccaggttgacaagaacaaagatgacgagctgacgggtttc

SEQ ID NO: 1015 - DNA, 336 bp, Artificial Sequence
  Synthetic
atgatcccgcgtggcctgtctgaagctaaaccagcaactccggaaattcaagagatcgtcgataaggtgaaaccgcagctggaagagaaaacgaacgaaacctacggtaagctggaagcggtccagtacaaaacccaagtgctagcacatcgtcatcatacccataaatggacctccaccaactattacattaaggttcgtgccggtgacaataagtatatgcacctgaaagtgttcaacggcccgtggccacattctatcgattaccgtcaggcggaccgtgttctgaccggttaccaggttgacaagaacaaagatgacgagctgacgggtttc

SEQ ID NO: 1016 - DNA, 336 bp, Artificial Sequence
  Synthetic
atgatcccgcgtggcctgtctgaagctaaaccagcaactccggaaattcaagagatcgtcgataaggtgaaaccgcagctggaagagaaaacgaacgaaacctacggtaagctggaagcggtccagtacaaaacccaagtgctagcaggtaaacatccacatcatcatcagaactccaccaactattacattaaggttcgtgccggtgacaataagtatatgcacctgaaagtgttcaacggcccgaaaggtcgttactctcatcatcatggtgcggaccgtgttctgaccggttaccaggttgacaagaacaaagatgacgagctgacgggtttc

SEQ ID NO: 1017 - DNA, 336 bp, Artificial Sequence
  Synthetic
atgatcccgcgtggcctgtctgaagctaaaccagcaactccggaaattcaagagatcgtcgataaggtgaaaccgcagctggaagagaaaacgaacgaaacctacggtaagctggaagcggtccagtacaaaacccaagtgctagcatggcataaacatcatctgcgttaccgttccaccaactattacattaaggttcgtgccggtgacaataagtatatgcacctgaaagtgttcaacggcccgtacccacaggataaacataaagttctggcggaccgtgttctgaccggttaccaggttgacaagaacaaagatgacgagctgacgggtttc

SEQ ID NO: 1018 - DNA, 336 bp, Artificial Sequence
  Synthetic
atgatcccgcgtggcctgtctgaagctaaaccagcaactccggaaattcaagagatcgtcgataaggtgaaaccgcagctggaagagaaaacgaacgaaacctacggtaagctggaagcggtccagtacaaaacccaagtgctagcaaaaacccataaagaataccatcattcttccaccaactattacattaaggttcgtgccggtgacaataagtatatgcacctgaaagtgttcaacggcccgggttaccgtcgtcatcagggtcgtggtgcggaccgtgttctgaccggttaccaggttgacaagaacaaagatgacgagctgacgggtttc

SEQ ID NO: 1019 - DNA, 336 bp, Artificial Sequence
  Synthetic
atgatcccgcgtggcctgtctgaagctaaaccagcaactccggaaattcaagagatcgtcgataaggtgaaaccgcagctggaagagaaaacgaacgaaacctacggtaagctggaagcggtccagtacaaaacccaagtgctagcacgtcgtcatcatcatcagcattggtcttccaccaactattacattaaggttcgtgccggtgacaataagtatatgcacctgaaagtgttcaacggcccggcactgcatgataccctgcatccatctgcggaccgtgttctgaccggttaccaggttgacaagaacaaagatgacgagctgacgggtttc

SEQ ID NO: 1020 - DNA, 336 bp, Artificial Sequence
  Synthetic
atgatcccgcgtggcctgtctgaagctaaaccagcaactccggaaattcaagagatcgtcgataaggtgaaaccgcagctggaagagaaaacgaacgaaacctacggtaagctggaagcggtccagtacaaaacccaagtgctagcaacccatcgttggcatcagggttctcgttccaccaactattacattaaggttcgtgccggtgacaataagtatatgcacctgaaagtgttcaacggcccgaaaaaaccacataaccatcgttactacgcggaccgtgttctgaccggttaccaggttgacaagaacaaagatgacgagctgacgggtttc

SEQ ID NO: 1021 - DNA, 336 bp, Artificial Sequence
  Synthetic
atgatcccgcgtggcctgtctgaagctaaaccagcaactccggaaattcaagagatcgtcgataaggtgaaaccgcagctggaagagaaaacgaacgaaacctacggtaagctggaagcggtccagtacaaaacccaagtgctagcaaaacgtggtcatcatcatccaaaccattccaccaactattacattaaggttcgtgccggtgacaataagtatatgcacctgaaagtgttcaacggcccggcaaaacatcattgggatacctggtctgcggaccgtgttctgaccggttaccaggttgacaagaacaaagatgacgagctgacgggtttc

SEQ ID NO: 1022 - DNA, 336 bp, Artificial Sequence
  Synthetic
atgatcccgcgtggcctgtctgaagctaaaccagcaactccggaaattcaagagatcgtcgataaggtgaaaccgcagctggaagagaaaacgaacgaaacctacggtaagctggaagcggtccagtacaaaacccaagtgctagcacataccgttccactgcgtaaacatcagtccaccaactattacattaaggttcgtgccggtgacaataagtatatgcacctgaaagtgttcaacggcccggttatccatcataaacatcgtcatcaggcggaccgtgttctgaccggttaccaggttgacaagaacaaagatgacgagctgacgggtttc

SEQ ID NO: 1023 - DNA, 336 bp, Artificial Sequence
  Synthetic
atgatcccgcgtggcctgtctgaagctaaaccagcaactccggaaattcaagagatcgtcgataaggtgaaaccgcagctggaagagaaaacgaacgaaacctacggtaagctggaagcggtccagtacaaaacccaagtgctagcaacctaccgttggggtcatcattttcattccaccaactattacattaaggttcgtgccggtgacaataagtatatgcacctgaaagtgttcaacggcccgaaatacgaacagatcgatcgttggcatgcggaccgtgttctgaccggttaccaggttgacaagaacaaagatgacgagctgacgggtttc

SEQ ID NO: 1024 - DNA, 336 bp, Artificial Sequence
  Synthetic
atgatcccgcgtggcctgtctgaagctaaaccagcaactccggaaattcaagagatcgtcgataaggtgaaaccgcagctggaagagaaaacgaacgaaacctacggtaagctggaagcggtccagtacaaaacccaagtgctagcatttaaacatcatgatcgtggtacccattccaccaactattacattaaggttcgtgccggtgacaataagtatatgcacctgaaagtgttcaacggcccgtaccgtaaacgtcatacctggtttcaggcggaccgtgttctgaccggttaccaggttgacaagaacaaagatgacgagctgacgggtttc

SEQ ID NO: 1025 - DNA, 336 bp, Artificial Sequence
  Synthetic
atgatcccgcgtggcctgtctgaagctaaaccagcaactccggaaattcaagagatcgtcgataaggtgaaaccgcagctggaagagaaaacgaacgaaacctacggtaagctggaagcggtccagtacaaaacccaagtgctagcaaccgcaaaaaaacatccaaaatctcattccaccaactattacattaaggttcgtgccggtgacaataagtatatgcacctgaaagtgttcaacggcccgaaagttaactggcatcactaccgtcatgcggaccgtgttctgaccggttaccaggttgacaagaacaaagatgacgagctgacgggtttc

SEQ ID NO: 1026 - DNA, 336 bp, Artificial Sequence
  Synthetic
atgatcccgcgtggcctgtctgaagctaaaccagcaactccggaaattcaagagatcgtcgataaggtgaaaccgcagctggaagagaaaacgaacgaaacctacggtaagctggaagcggtccagtacaaaacccaagtgctagcacattaccatttttctaaacatcataactccaccaactattacattaaggttcgtgccggtgacaataagtatatgcacctgaaagtgttcaacggcccgtcttaccatcataaacattttgttaaagcggaccgtgttctgaccggttaccaggttgacaagaacaaagatgacgagctgacgggtttc

SEQ ID NO: 1027 - DNA, 345 bp, Artificial Sequence
  Synthetic
atgatcccgcgtggcctgtctgaagctaaaccagcaactccggaaattcaagagatcgtcgataaggtgaaaccgcagctggaagagaaaacgaacgaaacctacggtaagctggaagcggtccagtacaaaacccaagtgctagcatacaaacataaacatggtaaatggcgttccaccaactattacattaaggttcgtgccggtgacaataagtatatgcacctgaaagtgttcaacggcccgtggcatggtcatttttctaaaggtggtgttgcatacgcggaccgtgttctgaccggttaccaggttgacaagaacaaagatgacgagctgacgggtttc

SEQ ID NO: 1028 - DNA, 336 bp, Artificial Sequence
  Synthetic
atgatcccgcgtggcctgtctgaagctaaaccagcaactccggaaattcaagagatcgtcgataaggtgaaaccgcagctggaagagaaaacgaacgaaacctacggtaagctggaagcggtccagtacaaaacccaagtgctagcagttcatcataaaccacataaaaccgaatccaccaactattacattaaggttcgtgccggtgacaataagtatatgcacctgaaagtgttcaacggcccggcaacccatctgaaacatcataaccatgcggaccgtgttctgaccggttaccaggttgacaagaacaaagatgacgagctgacgggtttc

SEQ ID NO: 1029 - DNA, 336 bp, Artificial Sequence
  Synthetic
atgatcccgcgtggcctgtctgaagctaaaccagcaactccggaaattcaagagatcgtcgataaggtgaaaccgcagctggaagagaaaacgaacgaaacctacggtaagctggaagcggtccagtacaaaacccaagtgctagcacatggtcagcgttaccataacaaatcttccaccaactattacattaaggttcgtgccggtgacaataagtatatgcacctgaaagtgttcaacggcccgaaacgtaaatgggaacattctcataaagcggaccgtgttctgaccggttaccaggttgacaagaacaaagatgacgagctgacgggtttc

SEQ ID NO: 1030 - DNA, 336 bp, Artificial Sequence
  Synthetic
atgatcccgcgtggcctgtctgaagctaaaccagcaactccggaaattcaagagatcgtcgataaggtgaaaccgcagctggaagagaaaacgaacgaaacctacggtaagctggaagcggtccagtacaaaacccaagtgctagcacataaacatcatcgtcatgttccatcttccaccaactattacattaaggttcgtgccggtgacaataagtatatgcacctgaaagtgttcaacggcccggatcatcgtcatcgtcattggtacctggcggaccgtgttctgaccggttaccaggttgacaagaacaaagatgacgagctgacgggtttc

SEQ ID NO: 1031 - DNA, 336 bp, Artificial Sequence
  Synthetic
atgatcccgcgtggcctgtctgaagctaaaccagcaactccggaaattcaagagatcgtcgataaggtgaaaccgcagctggaagagaaaacgaacgaaacctacggtaagctggaagcggtccagtacaaaacccaagtgctagcacatcgtaaacattcttggtctcgtcattccaccaactattacattaaggttcgtgccggtgacaataagtatatgcacctgaaagtgttcaacggcccgaccaaacattctcattctcagctgtttgcggaccgtgttctgaccggttaccaggttgacaagaacaaagatgacgagctgacgggtttc

SEQ ID NO: 1032 - DNA, 336 bp, Artificial Sequence
  Synthetic
atgatcccgcgtggcctgtctgaagctaaaccagcaactccggaaattcaagagatcgtcgataaggtgaaaccgcagctggaagagaaaacgaacgaaacctacggtaagctggaagcggtccagtacaaaacccaagtgctagcaaaccgtcattaccatcaggaatacaaatccaccaactattacattaaggttcgtgccggtgacaataagtatatgcacctgaaagtgttcaacggcccggttcataaatctaaacactggttttacgcggaccgtgttctgaccggttaccaggttgacaagaacaaagatgacgagctgacgggtttc

SEQ ID NO: 1033 - DNA, 336 bp, Artificial Sequence
  Synthetic
atgatcccgcgtggcctgtctgaagctaaaccagcaactccggaaattcaagagatcgtcgataaggtgaaaccgcagctggaagagaaaacgaacgaaacctacggtaagctggaagcggtccagtacaaaacccaagtgctagcaaaaatcaaacatcatcattcttttaaatccaccaactattacattaaggttcgtgccggtgacaataagtatatgcacctgaaagtgttcaacggcccgtctcaggatcatcattttcatcgtcatgcggaccgtgttctgaccggttaccaggttgacaagaacaaagatgacgagctgacgggtttc

SEQ ID NO: 1034 - DNA, 336 bp, Artificial Sequence
  Synthetic
atgatcccgcgtggcctgtctgaagctaaaccagcaactccggaaattcaagagatcgtcgataaggtgaaaccgcagctggaagagaaaacgaacgaaacctacggtaagctggaagcggtccagtacaaaacccaagtgctagcacagcataaacgttctcatcgtcagtcttccaccaactattacattaaggttcgtgccggtgacaataagtatatgcacctgaaagtgttcaacggcccgggtcataaatattctcattggtctaaagcggaccgtgttctgaccggttaccaggttgacaagaacaaagatgacgagctgacgggtttc

SEQ ID NO: 1035 - DNA, 330 bp, Artificial Sequence
  Synthetic
atgatcccgcgtggcctgtctgaagctaaaccagcaactccggaaattcaagagatcgtcgataaggtgaaaccgcagctggaagagaaaacgaacgaaacctacggtaagctggaagcggtccagtacaaaacccaagtgctagcatctgtttacaaatggaaagcatccaccaactattacattaaggttcgtgccggtgacaataagtatatgcacctgaaagtgttcaacggcccgaacaaacatcatcatcatgcacatcatgcggaccgtgttctgaccggttaccaggttgacaagaacaaagatgacgagctgacgggtttc

SEQ ID NO: 1036 - DNA, 336 bp, Artificial Sequence
  Synthetic
atgatcccgcgtggcctgtctgaagctaaaccagcaactccggaaattcaagagatcgtcgataaggtgaaaccgcagctggaagagaaaacgaacgaaacctacggtaagctggaagcggtccagtacaaaacccaagtgctagcacgtaaactggaacgtaccaaataccattccaccaactattacattaaggttcgtgccggtgacaataagtatatgcacctgaaagtgttcaacggcccgcataacaaataccatccacataacaaagcggaccgtgttctgaccggttaccaggttgacaagaacaaagatgacgagctgacgggtttc

SEQ ID NO: 1037 - DNA, 336 bp, Artificial Sequence
  Synthetic
atgatcccgcgtggcctgtctgaagctaaaccagcaactccggaaattcaagagatcgtcgataaggtgaaaccgcagctggaagagaaaacgaacgaaacctacggtaagctggaagcggtccagtacaaaacccaagtgctagcaaccggtcataaacatcagtttcatcagtccaccaactattacattaaggttcgtgccggtgacaataagtatatgcacctgaaagtgttcaacggcccgaaacataaacatggttggtttcattctgcggaccgtgttctgaccggttaccaggttgacaagaacaaagatgacgagctgacgggtttc

SEQ ID NO: 1038 - DNA, 336 bp, Artificial Sequence
  Synthetic
atgatcccgcgtggcctgtctgaagctaaaccagcaactccggaaattcaagagatcgtcgataaggtgaaaccgcagctggaagagaaaacgaacgaaacctacggtaagctggaagcggtccagtacaaaacccaagtgctagcatggcaggaactgggtcatcgtgtttactccaccaactattacattaaggttcgtgccggtgacaataagtatatgcacctgaaagtgttcaacggcccgtaccgtcgtcatcatgataaaaaacatgcggaccgtgttctgaccggttaccaggttgacaagaacaaagatgacgagctgacgggtttc

SEQ ID NO: 1039 - DNA, 336 bp, Artificial Sequence
  Synthetic
atgatcccgcgtggcctgtctgaagctaaaccagcaactccggaaattcaagagatcgtcgataaggtgaaaccgcagctggaagagaaaacgaacgaaacctacggtaagctggaagcggtccagtacaaaacccaagtgctagcacatccacatcataccgatcagcgtcattccaccaactattacattaaggttcgtgccggtgacaataagtatatgcacctgaaagtgttcaacggcccggaaggtcatcgtcagcatgcaaaatttgcggaccgtgttctgaccggttaccaggttgacaagaacaaagatgacgagctgacgggtttc

SEQ ID NO: 1040 - DNA, 336 bp, Artificial Sequence
  Synthetic
atgatcccgcgtggcctgtctgaagctaaaccagcaactccggaaattcaagagatcgtcgataaggtgaaaccgcagctggaagagaaaacgaacgaaacctacggtaagctggaagcggtccagtacaaaacccaagtgctagcatttcataaccatggtcatccacatctgtccaccaactattacattaaggttcgtgccggtgacaataagtatatgcacctgaaagtgttcaacggcccgaactctcgtggtcatcatcatcataaagcggaccgtgttctgaccggttaccaggttgacaagaacaaagatgacgagctgacgggtttc

SEQ ID NO: 1041 - DNA, 336 bp, Artificial Sequence
  Synthetic
atgatcccgcgtggcctgtctgaagctaaaccagcaactccggaaattcaagagatcgtcgataaggtgaaaccgcagctggaagagaaaacgaacgaaacctacggtaagctggaagcggtccagtacaaaacccaagtgctagcatggaaccatcatcatcgtaacaaacagtccaccaactattacattaaggttcgtgccggtgacaataagtatatgcacctgaaagtgttcaacggcccgccacataaacgtccacatctgtaccatgcggaccgtgttctgaccggttaccaggttgacaagaacaaagatgacgagctgacgggtttc

SEQ ID NO: 1042 - DNA, 336 bp, Artificial Sequence
  Synthetic
atgatcccgcgtggcctgtctgaagctaaaccagcaactccggaaattcaagagatcgtcgataaggtgaaaccgcagctggaagagaaaacgaacgaaacctacggtaagctggaagcggtccagtacaaaacccaagtgctagcaacccgtcatggtcatcgtcattaccgttccaccaactattacattaaggttcgtgccggtgacaataagtatatgcacctgaaagtgttcaacggcccgttttacgatctgcatccaaaactgtctgcggaccgtgttctgaccggttaccaggttgacaagaacaaagatgacgagctgacgggtttc

SEQ ID NO: 1043 - DNA, 336 bp, Artificial Sequence
  Synthetic
atgatcccgcgtggcctgtctgaagctaaaccagcaactccggaaattcaagagatcgtcgataaggtgaaaccgcagctggaagagaaaacgaacgaaacctacggtaagctggaagcggtccagtacaaaacccaagtgctagcaccacatcatcgttggcatcgtcagcattccaccaactattacattaaggttcgtgccggtgacaataagtatatgcacctgaaagtgttcaacggcccgatccatcagcattctcagaaaaaatctgcggaccgtgttctgaccggttaccaggttgacaagaacaaagatgacgagctgacgggtttc

SEQ ID NO: 1044 - DNA, 336 bp, Artificial Sequence
  Synthetic
atgatcccgcgtggcctgtctgaagctaaaccagcaactccggaaattcaagagatcgtcgataaggtgaaaccgcagctggaagagaaaacgaacgaaacctacggtaagctggaagcggtccagtacaaaacccaagtgctagcaaacctgcgtcatcagaccgaacatcgttccaccaactattacattaaggttcgtgccggtgacaataagtatatgcacctgaaagtgttcaacggcccgaaacgtcatcatcgtcattctcatgttgcggaccgtgttctgaccggttaccaggttgacaagaacaaagatgacgagctgacgggtttc

SEQ ID NO: 1045 - DNA, 336 bp, Artificial Sequence
  Synthetic
atgatcccgcgtggcctgtctgaagctaaaccagcaactccggaaattcaagagatcgtcgataaggtgaaaccgcagctggaagagaaaacgaacgaaacctacggtaagctggaagcggtccagtacaaaacccaagtgctagcaggtcatcgtaaacatacccatctgctgtccaccaactattacattaaggttcgtgccggtgacaataagtatatgcacctgaaagtgttcaacggcccgaaaaaatctcataaagcatgggcatgggcggaccgtgttctgaccggttaccaggttgacaagaacaaagatgacgagctgacgggtttc

SEQ ID NO: 1046 - DNA, 336 bp, Artificial Sequence
  Synthetic
atgatcccgcgtggcctgtctgaagctaaaccagcaactccggaaattcaagagatcgtcgataaggtgaaaccgcagctggaagagaaaacgaacgaaacctacggtaagctggaagcggtccagtacaaaacccaagtgctagcacgtcattctaaaccacagcattggccatccaccaactattacattaaggttcgtgccggtgacaataagtatatgcacctgaaagtgttcaacggcccgaaaggtcataaacagcatcatcattacgcggaccgtgttctgaccggttaccaggttgacaagaacaaagatgacgagctgacgggtttc

SEQ ID NO: 1047 - DNA, 336 bp, Artificial Sequence
  Synthetic
atgatcccgcgtggcctgtctgaagctaaaccagcaactccggaaattcaagagatcgtcgataaggtgaaaccgcagctggaagagaaaacgaacgaaacctacggtaagctggaagcggtccagtacaaaacccaagtgctagcaccacatcgttctcgttttcataaacagtccaccaactattacattaaggttcgtgccggtgacaataagtatatgcacctgaaagtgttcaacggcccgtggaaagcagaacgtcataaacattacgcggaccgtgttctgaccggttaccaggttgacaagaacaaagatgacgagctgacgggtttc

SEQ ID NO: 1048 - DNA, 336 bp, Artificial Sequence
  Synthetic
atgatcccgcgtggcctgtctgaagctaaaccagcaactccggaaattcaagagatcgtcgataaggtgaaaccgcagctggaagagaaaacgaacgaaacctacggtaagctggaagcggtccagtacaaaacccaagtgctagcacagcgtaaacattttcattgggatcattccaccaactattacattaaggttcgtgccggtgacaataagtatatgcacctgaaagtgttcaacggcccgcagcatcgttacacccatcatcataccgcggaccgtgttctgaccggttaccaggttgacaagaacaaagatgacgagctgacgggtttc

SEQ ID NO: 1049 - DNA, 336 bp, Artificial Sequence
  Synthetic
atgatcccgcgtggcctgtctgaagctaaaccagcaactccggaaattcaagagatcgtcgataaggtgaaaccgcagctggaagagaaaacgaacgaaacctacggtaagctggaagcggtccagtacaaaacccaagtgctagcaaacaaacatcatggtcagcagcataactccaccaactattacattaaggttcgtgccggtgacaataagtatatgcacctgaaagtgttcaacggcccgtctcataaagttcatacccattctaaagcggaccgtgttctgaccggttaccaggttgacaagaacaaagatgacgagctgacgggtttc

SEQ ID NO: 1050 - DNA, 336 bp, Artificial Sequence
  Synthetic
atgatcccgcgtggcctgtctgaagctaaaccagcaactccggaaattcaagagatcgtcgataaggtgaaaccgcagctggaagagaaaacgaacgaaacctacggtaagctggaagcggtccagtacaaaacccaagtgctagcaaaataccatcataaatacaaatcttactccaccaactattacattaaggttcgtgccggtgacaataagtatatgcacctgaaagtgttcaacggcccgaaacatctggatcagtaccatccatctgcggaccgtgttctgaccggttaccaggttgacaagaacaaagatgacgagctgacgggtttc

SEQ ID NO: 1051 - DNA, 336 bp, Artificial Sequence
  Synthetic
atgatcccgcgtggcctgtctgaagctaaaccagcaactccggaaattcaagagatcgtcgataaggtgaaaccgcagctggaagagaaaacgaacgaaacctacggtaagctggaagcggtccagtacaaaacccaagtgctagcacgtgaatggcatcatcagacctactactccaccaactattacattaaggttcgtgccggtgacaataagtatatgcacctgaaagtgttcaacggcccgtctgcacataaacatcatcataaccatgcggaccgtgttctgaccggttaccaggttgacaagaacaaagatgacgagctgacgggtttc

SEQ ID NO: 1052 - DNA, 336 bp, Artificial Sequence
  Synthetic
atgatcccgcgtggcctgtctgaagctaaaccagcaactccggaaattcaagagatcgtcgataaggtgaaaccgcagctggaagagaaaacgaacgaaacctacggtaagctggaagcggtccagtacaaaacccaagtgctagcacgtcattaccatgatcatcattaccgttccaccaactattacattaaggttcgtgccggtgacaataagtatatgcacctgaaagtgttcaacggcccgaaatacaaacatcaggttaaacagcatgcggaccgtgttctgaccggttaccaggttgacaagaacaaagatgacgagctgacgggtttc

SEQ ID NO: 1053 - DNA, 336 bp, Artificial Sequence
  Synthetic
atgatcccgcgtggcctgtctgaagctaaaccagcaactccggaaattcaagagatcgtcgataaggtgaaaccgcagctggaagagaaaacgaacgaaacctacggtaagctggaagcggtccagtacaaaacccaagtgctagcatctcatacctaccgtcattctaccggttccaccaactattacattaaggttcgtgccggtgacaataagtatatgcacctgaaagtgttcaacggcccgatctctcatcgtcatcgtcatgatatcgcggaccgtgttctgaccggttaccaggttgacaagaacaaagatgacgagctgacgggtttc

SEQ ID NO: 1054 - DNA, 336 bp, Artificial Sequence
  Synthetic
atgatcccgcgtggcctgtctgaagctaaaccagcaactccggaaattcaagagatcgtcgataaggtgaaaccgcagctggaagagaaaacgaacgaaacctacggtaagctggaagcggtccagtacaaaacccaagtgctagcaaaccatcgtcatcatcatccacatttttccaccaactattacattaaggttcgtgccggtgacaataagtatatgcacctgaaagtgttcaacggcccgaactaccatgcacatcgttctttttacgcggaccgtgttctgaccggttaccaggttgacaagaacaaagatgacgagctgacgggtttc

SEQ ID NO: 1055 - DNA, 336 bp, Artificial Sequence
  Synthetic
atgatcccgcgtggcctgtctgaagctaaaccagcaactccggaaattcaagagatcgtcgataaggtgaaaccgcagctggaagagaaaacgaacgaaacctacggtaagctggaagcggtccagtacaaaacccaagtgctagcacatgcaaaaacccgtcatcatgaacattccaccaactattacattaaggttcgtgccggtgacaataagtatatgcacctgaaagtgttcaacggcccgtggtttaaacatcatttttggcatcgtgcggaccgtgttctgaccggttaccaggttgacaagaacaaagatgacgagctgacgggtttc

SEQ ID NO: 1056 - DNA, 336 bp, Artificial Sequence
  Synthetic
atgatcccgcgtggcctgtctgaagctaaaccagcaactccggaaattcaagagatcgtcgataaggtgaaaccgcagctggaagagaaaacgaacgaaacctacggtaagctggaagcggtccagtacaaaacccaagtgctagcagaaccacatcagaaacataaacgtcattccaccaactattacattaaggttcgtgccggtgacaataagtatatgcacctgaaagtgttcaacggcccgaaacgtaaaggtgattttctgaactacgcggaccgtgttctgaccggttaccaggttgacaagaacaaagatgacgagctgacgggtttc

SEQ ID NO: 1057 - DNA, 336 bp, Artificial Sequence
  Synthetic
atgatcccgcgtggcctgtctgaagctaaaccagcaactccggaaattcaagagatcgtcgataaggtgaaaccgcagctggaagagaaaacgaacgaaacctacggtaagctggaagcggtccagtacaaaacccaagtgctagcagatcgtcgtcatcagcatggtcgtcattccaccaactattacattaaggttcgtgccggtgacaataagtatatgcacctgaaagtgttcaacggcccgcataaaccatggggtcatcataaactggcggaccgtgttctgaccggttaccaggttgacaagaacaaagatgacgagctgacgggtttc

SEQ ID NO: 1058 - DNA, 336 bp, Artificial Sequence
  Synthetic
atgatcccgcgtggcctgtctgaagctaaaccagcaactccggaaattcaagagatcgtcgataaggtgaaaccgcagctggaagagaaaacgaacgaaacctacggtaagctggaagcggtccagtacaaaacccaagtgctagcacatcagcatcgtcataacctgcagcagtccaccaactattacattaaggttcgtgccggtgacaataagtatatgcacctgaaagtgttcaacggcccgcagtacaaacataaacattggctgtgggcggaccgtgttctgaccggttaccaggttgacaagaacaaagatgacgagctgacgggtttc

SEQ ID NO: 1059 - DNA, 336 bp, Artificial Sequence
  Synthetic
atgatcccgcgtggcctgtctgaagctaaaccagcaactccggaaattcaagagatcgtcgataaggtgaaaccgcagctggaagagaaaacgaacgaaacctacggtaagctggaagcggtccagtacaaaacccaagtgctagcaaaacgtatccatacctggcataccgattccaccaactattacattaaggttcgtgccggtgacaataagtatatgcacctgaaagtgttcaacggcccgtttaaacgtcatcattcttggcatcatgcggaccgtgttctgaccggttaccaggttgacaagaacaaagatgacgagctgacgggtttc

SEQ ID NO: 1060 - DNA, 336 bp, Artificial Sequence
  Synthetic
atgatcccgcgtggcctgtctgaagctaaaccagcaactccggaaattcaagagatcgtcgataaggtgaaaccgcagctggaagagaaaacgaacgaaacctacggtaagctggaagcggtccagtacaaaacccaagtgctagcataccatcatcagccacgttaccagcagtccaccaactattacattaaggttcgtgccggtgacaataagtatatgcacctgaaagtgttcaacggcccgaaagatcgtcatcatgaatttcgtcatgcggaccgtgttctgaccggttaccaggttgacaagaacaaagatgacgagctgacgggtttc

SEQ ID NO: 1061 - DNA, 336 bp, Artificial Sequence
  Synthetic
atgatcccgcgtggcctgtctgaagctaaaccagcaactccggaaattcaagagatcgtcgataaggtgaaaccgcagctggaagagaaaacgaacgaaacctacggtaagctggaagcggtccagtacaaaacccaagtgctagcaggtatcggtcgtcatcgtcgtcgtcgttccaccaactattacattaaggttcgtgccggtgacaataagtatatgcacctgaaagtgttcaacggcccgcatcatcatcattttcataaccatcgtgcggaccgtgttctgaccggttaccaggttgacaagaacaaagatgacgagctgacgggtttc

SEQ ID NO: 1062 - DNA, 336 bp, Artificial Sequence
  Synthetic
atgatcccgcgtggcctgtctgaagctaaaccagcaactccggaaattcaagagatcgtcgataaggtgaaaccgcagctggaagagaaaacgaacgaaacctacggtaagctggaagcggtccagtacaaaacccaagtgctagcagatcagcataaacagcattaccatttttccaccaactattacattaaggttcgtgccggtgacaataagtatatgcacctgaaagtgttcaacggcccgtctgttaaccagcattttaaacataaagcggaccgtgttctgaccggttaccaggttgacaagaacaaagatgacgagctgacgggtttc

SEQ ID NO: 1063 - DNA, 336 bp, Artificial Sequence
  Synthetic
atgatcccgcgtggcctgtctgaagctaaaccagcaactccggaaattcaagagatcgtcgataaggtgaaaccgcagctggaagagaaaacgaacgaaacctacggtaagctggaagcggtccagtacaaaacccaagtgctagcaggtcgtcatcatgaatctcataaatcttccaccaactattacattaaggttcgtgccggtgacaataagtatatgcacctgaaagtgttcaacggcccgtttcagcataaactgcataaacatcatgcggaccgtgttctgaccggttaccaggttgacaagaacaaagatgacgagctgacgggtttc

SEQ ID NO: 1064 - DNA, 336 bp, Artificial Sequence
  Synthetic
atgatcccgcgtggcctgtctgaagctaaaccagcaactccggaaattcaagagatcgtcgataaggtgaaaccgcagctggaagagaaaacgaacgaaacctacggtaagctggaagcggtccagtacaaaacccaagtgctagcaaaacgtcatcatcattggcattactcttccaccaactattacattaaggttcgtgccggtgacaataagtatatgcacctgaaagtgttcaacggcccggatacccgttacgataaatggcatggtgcggaccgtgttctgaccggttaccaggttgacaagaacaaagatgacgagctgacgggtttc

SEQ ID NO: 1065 - DNA, 336 bp, Artificial Sequence
  Synthetic
atgatcccgcgtggcctgtctgaagctaaaccagcaactccggaaattcaagagatcgtcgataaggtgaaaccgcagctggaagagaaaacgaacgaaacctacggtaagctggaagcggtccagtacaaaacccaagtgctagcaaaccgtaaaggtggtcatcgttaccattccaccaactattacattaaggttcgtgccggtgacaataagtatatgcacctgaaagtgttcaacggcccgcatgttcatcgtgttcagcattctaaagcggaccgtgttctgaccggttaccaggttgacaagaacaaagatgacgagctgacgggtttc

SEQ ID NO: 1066 - DNA, 336 bp, Artificial Sequence
  Synthetic
atgatcccgcgtggcctgtctgaagctaaaccagcaactccggaaattcaagagatcgtcgataaggtgaaaccgcagctggaagagaaaacgaacgaaacctacggtaagctggaagcggtccagtacaaaacccaagtgctagcacgtaaatggcatggtcattggcatcgttccaccaactattacattaaggttcgtgccggtgacaataagtatatgcacctgaaagtgttcaacggcccgtggaactaccagtttaaatctgcatctgcggaccgtgttctgaccggttaccaggttgacaagaacaaagatgacgagctgacgggtttc

SEQ ID NO: 1067 - DNA, 336 bp, Artificial Sequence
  Synthetic
atgatcccgcgtggcctgtctgaagctaaaccagcaactccggaaattcaagagatcgtcgataaggtgaaaccgcagctggaagagaaaacgaacgaaacctacggtaagctggaagcggtccagtacaaaacccaagtgctagcaaactggaaacgtcatcattaccatcgttccaccaactattacattaaggttcgtgccggtgacaataagtatatgcacctgaaagtgttcaacggcccgcagtggtggtttcataaacatgttaaagcggaccgtgttctgaccggttaccaggttgacaagaacaaagatgacgagctgacgggtttc

SEQ ID NO: 1068 - DNA, 336 bp, Artificial Sequence
  Synthetic
atgatcccgcgtggcctgtctgaagctaaaccagcaactccggaaattcaagagatcgtcgataaggtgaaaccgcagctggaagagaaaacgaacgaaacctacggtaagctggaagcggtccagtacaaaacccaagtgctagcaacccgtcatcatcatcgtaaccgtttttccaccaactattacattaaggttcgtgccggtgacaataagtatatgcacctgaaagtgttcaacggcccgatctctcataacccaaaccattaccatgcggaccgtgttctgaccggttaccaggttgacaagaacaaagatgacgagctgacgggtttc

SEQ ID NO: 1069 - DNA, 336 bp, Artificial Sequence
  Synthetic
atgatcccgcgtggcctgtctgaagctaaaccagcaactccggaaattcaagagatcgtcgataaggtgaaaccgcagctggaagagaaaacgaacgaaacctacggtaagctggaagcggtccagtacaaaacccaagtgctagcagttaaatgggattttaaacatttttactccaccaactattacattaaggttcgtgccggtgacaataagtatatgcacctgaaagtgttcaacggcccgaccaacctgcattctccagattctccagcggaccgtgttctgaccggttaccaggttgacaagaacaaagatgacgagctgacgggtttc

SEQ ID NO: 1070 - DNA, 336 bp, Artificial Sequence
  Synthetic
atgatcccgcgtggcctgtctgaagctaaaccagcaactccggaaattcaagagatcgtcgataaggtgaaaccgcagctggaagagaaaacgaacgaaacctacggtaagctggaagcggtccagtacaaaacccaagtgctagcatctgatgatctgtctccagttaaatggtccaccaactattacattaaggttcgtgccggtgacaataagtatatgcacctgaaagtgttcaacggcccgtttgataaatacaactctcattacctggcggaccgtgttctgaccggttaccaggttgacaagaacaaagatgacgagctgacgggtttc

SEQ ID NO: 1071 - DNA, 336 bp, Artificial Sequence
  Synthetic
atgatcccgcgtggcctgtctgaagctaaaccagcaactccggaaattcaagagatcgtcgataaggtgaaaccgcagctggaagagaaaacgaacgaaacctacggtaagctggaagcggtccagtacaaaacccaagtgctagcacgtcatcgtcagaaatggccaatccattccaccaactattacattaaggttcgtgccggtgacaataagtatatgcacctgaaagtgttcaacggcccgtctacccatcagcagaaacatcagtgggcggaccgtgttctgaccggttaccaggttgacaagaacaaagatgacgagctgacgggtttc

SEQ ID NO: 1072 - DNA, 333 bp, Artificial Sequence
  Synthetic
atgatcccgcgtggcctgtctgaagctaaaccagcaactccggaaattcaagagatcgtcgataaggtgaaaccgcagctggaagagaaaacgaacgaaacctacggtaagctggaagcggtccagtacaaaacccaagtgctagcagatcgtcatgcataccatcgtcattccaccaactattacattaaggttcgtgccggtgacaataagtatatgcacctgaaagtgttcaacggcccgtttcatgaagaaatcaaacattggcaggcggaccgtgttctgaccggttaccaggttgacaagaacaaagatgacgagctgacgggtttc

SEQ ID NO: 1073 - DNA, 336 bp, Artificial Sequence
  Synthetic
atgatcccgcgtggcctgtctgaagctaaaccagcaactccggaaattcaagagatcgtcgataaggtgaaaccgcagctggaagagaaaacgaacgaaacctacggtaagctggaagcggtccagtacaaaacccaagtgctagcacatcgtcatcatcagaaacatgcattttccaccaactattacattaaggttcgtgccggtgacaataagtatatgcacctgaaagtgttcaacggcccgtggcgtgattggaaccatcgttttccagcggaccgtgttctgaccggttaccaggttgacaagaacaaagatgacgagctgacgggtttc

SEQ ID NO: 1074 - DNA, 336 bp, Artificial Sequence
  Synthetic
atgatcccgcgtggcctgtctgaagctaaaccagcaactccggaaattcaagagatcgtcgataaggtgaaaccgcagctggaagagaaaacgaacgaaacctacggtaagctggaagcggtccagtacaaaacccaagtgctagcacagaaaggtaaacatcatgattaccgttccaccaactattacattaaggttcgtgccggtgacaataagtatatgcacctgaaagtgttcaacggcccgaaaccacatcagaccaaatggcatcatgcggaccgtgttctgaccggttaccaggttgacaagaacaaagatgacgagctgacgggtttc

SEQ ID NO: 1075 - DNA, 336 bp, Artificial Sequence
  Synthetic
atgatcccgcgtggcctgtctgaagctaaaccagcaactccggaaattcaagagatcgtcgataaggtgaaaccgcagctggaagagaaaacgaacgaaacctacggtaagctggaagcggtccagtacaaaacccaagtgctagcatggaacaaacatttttacaaacagggttccaccaactattacattaaggttcgtgccggtgacaataagtatatgcacctgaaagtgttcaacggcccgcgtcatcatcgtcagtctcatcattgggcggaccgtgttctgaccggttaccaggttgacaagaacaaagatgacgagctgacgggtttc

SEQ ID NO: 1076 - DNA, 336 bp, Artificial Sequence
  Synthetic
atgatcccgcgtggcctgtctgaagctaaaccagcaactccggaaattcaagagatcgtcgataaggtgaaaccgcagctggaagagaaaacgaacgaaacctacggtaagctggaagcggtccagtacaaaacccaagtgctagcaaaacgtcgtcataaccgtgaatttgtttccaccaactattacattaaggttcgtgccggtgacaataagtatatgcacctgaaagtgttcaacggcccgatccgtcattaccatgcagatcgtgaagcggaccgtgttctgaccggttaccaggttgacaagaacaaagatgacgagctgacgggtttc

SEQ ID NO: 1077 - DNA, 336 bp, Artificial Sequence
  Synthetic
atgatcccgcgtggcctgtctgaagctaaaccagcaactccggaaattcaagagatcgtcgataaggtgaaaccgcagctggaagagaaaacgaacgaaacctacggtaagctggaagcggtccagtacaaaacccaagtgctagcaacccgtcatgttcgtcattggacccattccaccaactattacattaaggttcgtgccggtgacaataagtatatgcacctgaaagtgttcaacggcccggcatctcaggttccaccaaaacatcgtgcggaccgtgttctgaccggttaccaggttgacaagaacaaagatgacgagctgacgggtttc

SEQ ID NO: 1078 - DNA, 336 bp, Artificial Sequence
  Synthetic
atgatcccgcgtggcctgtctgaagctaaaccagcaactccggaaattcaagagatcgtcgataaggtgaaaccgcagctggaagagaaaacgaacgaaacctacggtaagctggaagcggtccagtacaaaacccaagtgctagcaaaccgtaaatggcagcagaaccatcattccaccaactattacattaaggttcgtgccggtgacaataagtatatgcacctgaaagtgttcaacggcccgaaacataaacattggcatcatcagctggcggaccgtgttctgaccggttaccaggttgacaagaacaaagatgacgagctgacgggtttc

SEQ ID NO: 1079 - DNA, 336 bp, Artificial Sequence
  Synthetic
atgatcccgcgtggcctgtctgaagctaaaccagcaactccggaaattcaagagatcgtcgataaggtgaaaccgcagctggaagagaaaacgaacgaaacctacggtaagctggaagcggtccagtacaaaacccaagtgctagcacgtcaccgtgaaaaacatcagccatactccaccaactattacattaaggttcgtgccggtgacaataagtatatgcacctgaaagtgttcaacggcccgtgggaacatcatcgtacccgttggcaggcggaccgtgttctgaccggttaccaggttgacaagaacaaagatgacgagctgacgggtttc

SEQ ID NO: 1080 - DNA, 336 bp, Artificial Sequence
  Synthetic
atgatcccgcgtggcctgtctgaagctaaaccagcaactccggaaattcaagagatcgtcgataaggtgaaaccgcagctggaagagaaaacgaacgaaacctacggtaagctggaagcggtccagtacaaaacccaagtgctagcataccataaacataactctaaacattcttccaccaactattacattaaggttcgtgccggtgacaataagtatatgcacctgaaagtgttcaacggcccgtttaaaacctttaaagaatggcatgttgcggaccgtgttctgaccggttaccaggttgacaagaacaaagatgacgagctgacgggtttc

SEQ ID NO: 1081 - DNA, 336 bp, Artificial Sequence
  Synthetic
atgatcccgcgtggcctgtctgaagctaaaccagcaactccggaaattcaagagatcgtcgataaggtgaaaccgcagctggaagagaaaacgaacgaaacctacggtaagctggaagcggtccagtacaaaacccaagtgctagcaccagcaggtcagcataaacgtaaacattccaccaactattacattaaggttcgtgccggtgacaataagtatatgcacctgaaagtgttcaacggcccgaaaggtcatcgttggcatgattttaaagcggaccgtgttctgaccggttaccaggttgacaagaacaaagatgacgagctgacgggtttc

SEQ ID NO: 1082 - DNA, 336 bp, Artificial Sequence
  Synthetic
atgatcccgcgtggcctgtctgaagctaaaccagcaactccggaaattcaagagatcgtcgataaggtgaaaccgcagctggaagagaaaacgaacgaaacctacggtaagctggaagcggtccagtacaaaacccaagtgctagcagatcgtcataaatacccagttcgtgtttccaccaactattacattaaggttcgtgccggtgacaataagtatatgcacctgaaagtgttcaacggcccgaaacatgcatggcagcatcataaatctgcggaccgtgttctgaccggttaccaggttgacaagaacaaagatgacgagctgacgggtttc

SEQ ID NO: 1083 - DNA, 336 bp, Artificial Sequence
  Synthetic
atgatcccgcgtggcctgtctgaagctaaaccagcaactccggaaattcaagagatcgtcgataaggtgaaaccgcagctggaagagaaaacgaacgaaacctacggtaagctggaagcggtccagtacaaaacccaagtgctagcaggtaacaacaacccacagggtcatgtttccaccaactattacattaaggttcgtgccggtgacaataagtatatgcacctgaaagtgttcaacggcccgtacaaacattttaaacatcattggcgtgcggaccgtgttctgaccggttaccaggttgacaagaacaaagatgacgagctgacgggtttc

SEQ ID NO: 1084 - DNA, 336 bp, Artificial Sequence
  Synthetic
atgatcccgcgtggcctgtctgaagctaaaccagcaactccggaaattcaagagatcgtcgataaggtgaaaccgcagctggaagagaaaacgaacgaaacctacggtaagctggaagcggtccagtacaaaacccaagtgctagcaaaacagctgcatcatcatcattacaaatccaccaactattacattaaggttcgtgccggtgacaataagtatatgcacctgaaagtgttcaacggcccggcacatcgtaaattttttcagtggcatgcggaccgtgttctgaccggttaccaggttgacaagaacaaagatgacgagctgacgggtttc

SEQ ID NO: 1085 - DNA, 336 bp, Artificial Sequence
  Synthetic
atgatcccgcgtggcctgtctgaagctaaaccagcaactccggaaattcaagagatcgtcgataaggtgaaaccgcagctggaagagaaaacgaacgaaacctacggtaagctggaagcggtccagtacaaaacccaagtgctagcacagaaacataactggcatcgttggcattccaccaactattacattaaggttcgtgccggtgacaataagtatatgcacctgaaagtgttcaacggcccgtggacccatcgttctcaggttaaagttgcggaccgtgttctgaccggttaccaggttgacaagaacaaagatgacgagctgacgggtttc

SEQ ID NO: 1086 - DNA, 336 bp, Artificial Sequence
  Synthetic
atgatcccgcgtggcctgtctgaagctaaaccagcaactccggaaattcaagagatcgtcgataaggtgaaaccgcagctggaagagaaaacgaacgaaacctacggtaagctggaagcggtccagtacaaaacccaagtgctagcatacaaacatctgggttactggcagaaatccaccaactattacattaaggttcgtgccggtgacaataagtatatgcacctgaaagtgttcaacggcccgtttcagtggtttaaagttggtgttccagcggaccgtgttctgaccggttaccaggttgacaagaacaaagatgacgagctgacgggtttc

SEQ ID NO: 1087 - DNA, 336 bp, Artificial Sequence
  Synthetic
atgatcccgcgtggcctgtctgaagctaaaccagcaactccggaaattcaagagatcgtcgataaggtgaaaccgcagctggaagagaaaacgaacgaaacctacggtaagctggaagcggtccagtacaaaacccaagtgctagcacatcagaaaaactttgaagcatgggaatccaccaactattacattaaggttcgtgccggtgacaataagtatatgcacctgaaagtgttcaacggcccggttcgttactactctaaataccagtgggcggaccgtgttctgaccggttaccaggttgacaagaacaaagatgacgagctgacgggtttc

SEQ ID NO: 1088 - DNA, 336 bp, Artificial Sequence
  Synthetic
atgatcccgcgtggcctgtctgaagctaaaccagcaactccggaaattcaagagatcgtcgataaggtgaaaccgcagctggaagagaaaacgaacgaaacctacggtaagctggaagcggtccagtacaaaacccaagtgctagcagaacgtgttcgtcgtcgtcatccaccatccaccaactattacattaaggttcgtgccggtgacaataagtatatgcacctgaaagtgttcaacggcccgaacggttggcatgttggtcatcatatcgcggaccgtgttctgaccggttaccaggttgacaagaacaaagatgacgagctgacgggtttc

SEQ ID NO: 1089 - DNA, 336 bp, Artificial Sequence
  Synthetic
atgatcccgcgtggcctgtctgaagctaaaccagcaactccggaaattcaagagatcgtcgataaggtgaaaccgcagctggaagagaaaacgaacgaaacctacggtaagctggaagcggtccagtacaaaacccaagtgctagcacataaagttcatatctttcgtgaaccatccaccaactattacattaaggttcgtgccggtgacaataagtatatgcacctgaaagtgttcaacggcccgacccgttttcgtcattacctggttaccgcggaccgtgttctgaccggttaccaggttgacaagaacaaagatgacgagctgacgggtttc

SEQ ID NO: 1090 - DNA, 336 bp, Artificial Sequence
  Synthetic
atgatcccgcgtggcctgtctgaagctaaaccagcaactccggaaattcaagagatcgtcgataaggtgaaaccgcagctggaagagaaaacgaacgaaacctacggtaagctggaagcggtccagtacaaaacccaagtgctagcagttaaatcttttcatgttcattctcattccaccaactattacattaaggttcgtgccggtgacaataagtatatgcacctgaaagtgttcaacggcccgtcttggcgtaacgttcgtccagaatttgcggaccgtgttctgaccggttaccaggttgacaagaacaaagatgacgagctgacgggtttc

SEQ ID NO: 1091 - DNA, 336 bp, Artificial Sequence
  Synthetic
atgatcccgcgtggcctgtctgaagctaaaccagcaactccggaaattcaagagatcgtcgataaggtgaaaccgcagctggaagagaaaacgaacgaaacctacggtaagctggaagcggtccagtacaaaacccaagtgctagcatggcataaagatccaccaccaccatggtccaccaactattacattaaggttcgtgccggtgacaataagtatatgcacctgaaagtgttcaacggcccgtttggtcataccttttcttggcgttacgcggaccgtgttctgaccggttaccaggttgacaagaacaaagatgacgagctgacgggtttc

SEQ ID NO: 1092 - DNA, 336 bp, Artificial Sequence
  Synthetic
atgatcccgcgtggcctgtctgaagctaaaccagcaactccggaaattcaagagatcgtcgataaggtgaaaccgcagctggaagagaaaacgaacgaaacctacggtaagctggaagcggtccagtacaaaacccaagtgctagcacatcgttacgcacataaccattttctgtccaccaactattacattaaggttcgtgccggtgacaataagtatatgcacctgaaagtgttcaacggcccgtttaaacatcagaaattttaccgtgatgcggaccgtgttctgaccggttaccaggttgacaagaacaaagatgacgagctgacgggtttc

SEQ ID NO: 1093 - DNA, 336 bp, Artificial Sequence
  Synthetic
atgatcccgcgtggcctgtctgaagctaaaccagcaactccggaaattcaagagatcgtcgataaggtgaaaccgcagctggaagagaaaacgaacgaaacctacggtaagctggaagcggtccagtacaaaacccaagtgctagcagtttctcatgcactgaaaacccatacctccaccaactattacattaaggttcgtgccggtgacaataagtatatgcacctgaaagtgttcaacggcccgtggcgtaacaaatggcgtgcacaggatgcggaccgtgttctgaccggttaccaggttgacaagaacaaagatgacgagctgacgggtttc

SEQ ID NO: 1094 - DNA, 336 bp, Artificial Sequence
  Synthetic
atgatcccgcgtggcctgtctgaagctaaaccagcaactccggaaattcaagagatcgtcgataaggtgaaaccgcagctggaagagaaaacgaacgaaacctacggtaagctggaagcggtccagtacaaaacccaagtgctagcacatcagtctcgtgcaatctacgtttactccaccaactattacattaaggttcgtgccggtgacaataagtatatgcacctgaaagtgttcaacggcccgtaccagaaatcttactttcatcgtcatgcggaccgtgttctgaccggttaccaggttgacaagaacaaagatgacgagctgacgggtttc

SEQ ID NO: 1095 - DNA, 336 bp, Artificial Sequence
  Synthetic
atgatcccgcgtggcctgtctgaagctaaaccagcaactccggaaattcaagagatcgtcgataaggtgaaaccgcagctggaagagaaaacgaacgaaacctacggtaagctggaagcggtccagtacaaaacccaagtgctagcacatcataccacctaccatcagcaccattccaccaactattacattaaggttcgtgccggtgacaataagtatatgcacctgaaagtgttcaacggcccgtggcgtccacgtccagttcattggaaagcggaccgtgttctgaccggttaccaggttgacaagaacaaagatgacgagctgacgggtttc

SEQ ID NO: 1096 - DNA, 336 bp, Artificial Sequence
  Synthetic
atgatcccgcgtggcctgtctgaagctaaaccagcaactccggaaattcaagagatcgtcgataaggtgaaaccgcagctggaagagaaaacgaacgaaacctacggtaagctggaagcggtccagtacaaaacccaagtgctagcaacctggtggcgtaacgttcagcatcattccaccaactattacattaaggttcgtgccggtgacaataagtatatgcacctgaaagtgttcaacggcccggatccacagtacaaacgtcatggttacgcggaccgtgttctgaccggttaccaggttgacaagaacaaagatgacgagctgacgggtttc

SEQ ID NO: 1097 - DNA, 336 bp, Artificial Sequence
  Synthetic
atgatcccgcgtggcctgtctgaagctaaaccagcaactccggaaattcaagagatcgtcgataaggtgaaaccgcagctggaagagaaaacgaacgaaacctacggtaagctggaagcggtccagtacaaaacccaagtgctagcatggaacaaacataactaccagcatcagtccaccaactattacattaaggttcgtgccggtgacaataagtatatgcacctgaaagtgttcaacggcccggttccacattctgttgttcattacaaagcggaccgtgttctgaccggttaccaggttgacaagaacaaagatgacgagctgacgggtttc

SEQ ID NO: 1098 - DNA, 336 bp, Artificial Sequence
  Synthetic
atgatcccgcgtggcctgtctgaagctaaaccagcaactccggaaattcaagagatcgtcgataaggtgaaaccgcagctggaagagaaaacgaacgaaacctacggtaagctggaagcggtccagtacaaaacccaagtgctagcacagcataccctgcgtgttcataccgtttccaccaactattacattaaggttcgtgccggtgacaataagtatatgcacctgaaagtgttcaacggcccggcatactctcagtcttttatccatcatgcggaccgtgttctgaccggttaccaggttgacaagaacaaagatgacgagctgacgggtttc

SEQ ID NO: 1099 - DNA, 336 bp, Artificial Sequence
  Synthetic
atgatcccgcgtggcctgtctgaagctaaaccagcaactccggaaattcaagagatcgtcgataaggtgaaaccgcagctggaagagaaaacgaacgaaacctacggtaagctggaagcggtccagtacaaaacccaagtgctagcaaaccagcattttcatcaggcaggtcattccaccaactattacattaaggttcgtgccggtgacaataagtatatgcacctgaaagtgttcaacggcccgttttctcattctacctggcgttaccatgcggaccgtgttctgaccggttaccaggttgacaagaacaaagatgacgagctgacgggtttc

SEQ ID NO: 1100 - DNA, 333 bp, Artificial Sequence
  Synthetic
atgatcccgcgtggcctgtctgaagctaaaccagcaactccggaaattcaagagatcgtcgataaggtgaaaccgcagctggaagagaaaacgaacgaaacctacggtaagctggaagcggtccagtacaaaacccaagtgctagcacgtcagtggaccgatcgtgtttgggtttccaccaactattacattaaggttcgtgccggtgacaataagtatatgcacctgaaagtgttcaacggcccgtctaaaaaacatcagcagcattgggcggaccgtgttctgaccggttaccaggttgacaagaacaaagatgacgagctgacgggtttc

SEQ ID NO: 1101 - DNA, 336 bp, Artificial Sequence
  Synthetic
atgatcccgcgtggcctgtctgaagctaaaccagcaactccggaaattcaagagatcgtcgataaggtgaaaccgcagctggaagagaaaacgaacgaaacctacggtaagctggaagcggtccagtacaaaacccaagtgctagcagatcatgattactttcatcataacaaatccaccaactattacattaaggttcgtgccggtgacaataagtatatgcacctgaaagtgttcaacggcccggcaaaacatccacgtatccatgttaccgcggaccgtgttctgaccggttaccaggttgacaagaacaaagatgacgagctgacgggtttc

SEQ ID NO: 1102 - DNA, 336 bp, Artificial Sequence
  Synthetic
atgatcccgcgtggcctgtctgaagctaaaccagcaactccggaaattcaagagatcgtcgataaggtgaaaccgcagctggaagagaaaacgaacgaaacctacggtaagctggaagcggtccagtacaaaacccaagtgctagcatactgggatgttggtccaggttttaactccaccaactattacattaaggttcgtgccggtgacaataagtatatgcacctgaaagtgttcaacggcccgtctccatggcatcatccaacccattttgcggaccgtgttctgaccggttaccaggttgacaagaacaaagatgacgagctgacgggtttc

SEQ ID NO: 1103 - DNA, 336 bp, Artificial Sequence
  Synthetic
atgatcccgcgtggcctgtctgaagctaaaccagcaactccggaaattcaagagatcgtcgataaggtgaaaccgcagctggaagagaaaacgaacgaaacctacggtaagctggaagcggtccagtacaaaacccaagtgctagcaggtatccatggtcatcatgaatactactccaccaactattacattaaggttcgtgccggtgacaataagtatatgcacctgaaagtgttcaacggcccgtctaactggtttcatcataaacatcgtgcggaccgtgttctgaccggttaccaggttgacaagaacaaagatgacgagctgacgggtttc

SEQ ID NO: 1104 - DNA, 336 bp, Artificial Sequence
  Synthetic
atgatcccgcgtggcctgtctgaagctaaaccagcaactccggaaattcaagagatcgtcgataaggtgaaaccgcagctggaagagaaaacgaacgaaacctacggtaagctggaagcggtccagtacaaaacccaagtgctagcatggcagcgttctcgttacggtaaatactccaccaactattacattaaggttcgtgccggtgacaataagtatatgcacctgaaagtgttcaacggcccggcatactggccataccagaaaccaaccgcggaccgtgttctgaccggttaccaggttgacaagaacaaagatgacgagctgacgggtttc

SEQ ID NO: 1105 - DNA, 336 bp, Artificial Sequence
  Synthetic
atgatcccgcgtggcctgtctgaagctaaaccagcaactccggaaattcaagagatcgtcgataaggtgaaaccgcagctggaagagaaaacgaacgaaacctacggtaagctggaagcggtccagtacaaaacccaagtgctagcataccatcagcagcattggcgtgttcattccaccaactattacattaaggttcgtgccggtgacaataagtatatgcacctgaaagtgttcaacggcccgatcctggttggttacaactggcattacgcggaccgtgttctgaccggttaccaggttgacaagaacaaagatgacgagctgacgggtttc

SEQ ID NO: 1106 - DNA, 336 bp, Artificial Sequence
  Synthetic
atgatcccgcgtggcctgtctgaagctaaaccagcaactccggaaattcaagagatcgtcgataaggtgaaaccgcagctggaagagaaaacgaacgaaacctacggtaagctggaagcggtccagtacaaaacccaagtgctagcagcaacccgtaactcttacccacgtcattccaccaactattacattaaggttcgtgccggtgacaataagtatatgcacctgaaagtgttcaacggcccggttcattctcatctgccacgtcatccagcggaccgtgttctgaccggttaccaggttgacaagaacaaagatgacgagctgacgggtttc

SEQ ID NO: 1107 - DNA, 336 bp, Artificial Sequence
  Synthetic
atgatcccgcgtggcctgtctgaagctaaaccagcaactccggaaattcaagagatcgtcgataaggtgaaaccgcagctggaagagaaaacgaacgaaacctacggtaagctggaagcggtccagtacaaaacccaagtgctagcagaacatcatcatgcacattgggcaacctccaccaactattacattaaggttcgtgccggtgacaataagtatatgcacctgaaagtgttcaacggcccgctgtttctgcatggtgttcatatctttgcggaccgtgttctgaccggttaccaggttgacaagaacaaagatgacgagctgacgggtttc

SEQ ID NO: 1108 - DNA, 336 bp, Artificial Sequence
  Synthetic
atgatcccgcgtggcctgtctgaagctaaaccagcaactccggaaattcaagagatcgtcgataaggtgaaaccgcagctggaagagaaaacgaacgaaacctacggtaagctggaagcggtccagtacaaaacccaagtgctagcaaaacagcatcagcgttcttttatcatctccaccaactattacattaaggttcgtgccggtgacaataagtatatgcacctgaaagtgttcaacggcccgacctctctgccatctgaatggtttcaggcggaccgtgttctgaccggttaccaggttgacaagaacaaagatgacgagctgacgggtttc

SEQ ID NO: 1109 - DNA, 336 bp, Artificial Sequence
  Synthetic
atgatcccgcgtggcctgtctgaagctaaaccagcaactccggaaattcaagagatcgtcgataaggtgaaaccgcagctggaagagaaaacgaacgaaacctacggtaagctggaagcggtccagtacaaaacccaagtgctagcacagttttggggtcatcgtgttgaacattccaccaactattacattaaggttcgtgccggtgacaataagtatatgcacctgaaagtgttcaacggcccgacccgtcattaccatcagcgtaaccgtgcggaccgtgttctgaccggttaccaggttgacaagaacaaagatgacgagctgacgggtttc

SEQ ID NO: 1110 - DNA, 336 bp, Artificial Sequence
  Synthetic
atgatcccgcgtggcctgtctgaagctaaaccagcaactccggaaattcaagagatcgtcgataaggtgaaaccgcagctggaagagaaaacgaacgaaacctacggtaagctggaagcggtccagtacaaaacccaagtgctagcatttccatcttctcatcgtacctcttactccaccaactattacattaaggttcgtgccggtgacaataagtatatgcacctgaaagtgttcaacggcccgtactctgcacatcatatccgttggcatgcggaccgtgttctgaccggttaccaggttgacaagaacaaagatgacgagctgacgggtttc

SEQ ID NO: 1111 - DNA, 336 bp, Artificial Sequence
  Synthetic
atgatcccgcgtggcctgtctgaagctaaaccagcaactccggaaattcaagagatcgtcgataaggtgaaaccgcagctggaagagaaaacgaacgaaacctacggtaagctggaagcggtccagtacaaaacccaagtgctagcatcttctaaatacatcgatcatcgtcagtccaccaactattacattaaggttcgtgccggtgacaataagtatatgcacctgaaagtgttcaacggcccggaacgtgcacagcatcatacccatccagcggaccgtgttctgaccggttaccaggttgacaagaacaaagatgacgagctgacgggtttc

SEQ ID NO: 1112 - DNA, 336 bp, Artificial Sequence
  Synthetic
atgatcccgcgtggcctgtctgaagctaaaccagcaactccggaaattcaagagatcgtcgataaggtgaaaccgcagctggaagagaaaacgaacgaaacctacggtaagctggaagcggtccagtacaaaacccaagtgctagcatactggcgtcatgaacattcttctccatccaccaactattacattaaggttcgtgccggtgacaataagtatatgcacctgaaagtgttcaacggcccgtggaaaaaacatcattacggtcattacgcggaccgtgttctgaccggttaccaggttgacaagaacaaagatgacgagctgacgggtttc

SEQ ID NO: 1113 - DNA, 336 bp, Artificial Sequence
  Synthetic
atgatcccgcgtggcctgtctgaagctaaaccagcaactccggaaattcaagagatcgtcgataaggtgaaaccgcagctggaagagaaaacgaacgaaacctacggtaagctggaagcggtccagtacaaaacccaagtgctagcagaacgtgcacattacgatcatcattactccaccaactattacattaaggttcgtgccggtgacaataagtatatgcacctgaaagtgttcaacggcccgtctcatcatgcacatcattctgttcaggcggaccgtgttctgaccggttaccaggttgacaagaacaaagatgacgagctgacgggtttc

SEQ ID NO: 1114 - DNA, 336 bp, Artificial Sequence
  Synthetic
atgatcccgcgtggcctgtctgaagctaaaccagcaactccggaaattcaagagatcgtcgataaggtgaaaccgcagctggaagagaaaacgaacgaaacctacggtaagctggaagcggtccagtacaaaacccaagtgctagcatggcgtcataaagcatacatctacggttccaccaactattacattaaggttcgtgccggtgacaataagtatatgcacctgaaagtgttcaacggcccgtggaaacattgggaacataaaccacaggcggaccgtgttctgaccggttaccaggttgacaagaacaaagatgacgagctgacgggtttc

SEQ ID NO: 1115 - DNA, 336 bp, Artificial Sequence
  Synthetic
atgatcccgcgtggcctgtctgaagctaaaccagcaactccggaaattcaagagatcgtcgataaggtgaaaccgcagctggaagagaaaacgaacgaaacctacggtaagctggaagcggtccagtacaaaacccaagtgctagcaccacagatcaaagaacagtacaacggttccaccaactattacattaaggttcgtgccggtgacaataagtatatgcacctgaaagtgttcaacggcccggcacaggttccagttctgctgtggtacgcggaccgtgttctgaccggttaccaggttgacaagaacaaagatgacgagctgacgggtttc

SEQ ID NO: 1116 - DNA, 336 bp, Artificial Sequence
  Synthetic
atgatcccgcgtggcctgtctgaagctaaaccagcaactccggaaattcaagagatcgtcgataaggtgaaaccgcagctggaagagaaaacgaacgaaacctacggtaagctggaagcggtccagtacaaaacccaagtgctagcatttaaaaaagttgcacgtgatcattggtccaccaactattacattaaggttcgtgccggtgacaataagtatatgcacctgaaagtgttcaacggcccgtgggttcatttttacccatggcagcaggcggaccgtgttctgaccggttaccaggttgacaagaacaaagatgacgagctgacgggtttc

SEQ ID NO: 1117 - DNA, 336 bp, Artificial Sequence
  Synthetic
atgatcccgcgtggcctgtctgaagctaaaccagcaactccggaaattcaagagatcgtcgataaggtgaaaccgcagctggaagagaaaacgaacgaaacctacggtaagctggaagcggtccagtacaaaacccaagtgctagcagcacagaaacatcattggcacaaaacctccaccaactattacattaaggttcgtgccggtgacaataagtatatgcacctgaaagtgttcaacggcccgtggcatctggcacatgttttttacaccgcggaccgtgttctgaccggttaccaggttgacaagaacaaagatgacgagctgacgggtttc

SEQ ID NO: 1118 - DNA, 336 bp, Artificial Sequence
  Synthetic
atgatcccgcgtggcctgtctgaagctaaaccagcaactccggaaattcaagagatcgtcgataaggtgaaaccgcagctggaagagaaaacgaacgaaacctacggtaagctggaagcggtccagtacaaaacccaagtgctagcagtttctcagggtcatcattcttgggattccaccaactattacattaaggttcgtgccggtgacaataagtatatgcacctgaaagtgttcaacggcccgtcttctcatcatcataaaaaccatcatgcggaccgtgttctgaccggttaccaggttgacaagaacaaagatgacgagctgacgggtttc

SEQ ID NO: 1119 - DNA, 336 bp, Artificial Sequence
  Synthetic
atgatcccgcgtggcctgtctgaagctaaaccagcaactccggaaattcaagagatcgtcgataaggtgaaaccgcagctggaagagaaaacgaacgaaacctacggtaagctggaagcggtccagtacaaaacccaagtgctagcatggcatctgcgtggtcatccacattactccaccaactattacattaaggttcgtgccggtgacaataagtatatgcacctgaaagtgttcaacggcccgaccaaacagccacatggtgttcattacgcggaccgtgttctgaccggttaccaggttgacaagaacaaagatgacgagctgacgggtttc

SEQ ID NO: 1120 - DNA, 336 bp, Artificial Sequence
  Synthetic
atgatcccgcgtggcctgtctgaagctaaaccagcaactccggaaattcaagagatcgtcgataaggtgaaaccgcagctggaagagaaaacgaacgaaacctacggtaagctggaagcggtccagtacaaaacccaagtgctagcacattctcatcatcatcagccatgggaatccaccaactattacattaaggttcgtgccggtgacaataagtatatgcacctgaaagtgttcaacggcccggaacatcgtacccatcatctgggtaaagcggaccgtgttctgaccggttaccaggttgacaagaacaaagatgacgagctgacgggtttc

SEQ ID NO: 1121 - DNA, 336 bp, Artificial Sequence
  Synthetic
atgatcccgcgtggcctgtctgaagctaaaccagcaactccggaaattcaagagatcgtcgataaggtgaaaccgcagctggaagagaaaacgaacgaaacctacggtaagctggaagcggtccagtacaaaacccaagtgctagcacgtcgttttcgtgttcatctgcatcagtccaccaactattacattaaggttcgtgccggtgacaataagtatatgcacctgaaagtgttcaacggcccgaccaaccatcgtcaggatcatccagaagcggaccgtgttctgaccggttaccaggttgacaagaacaaagatgacgagctgacgggtttc

SEQ ID NO: 1122 - DNA, 336 bp, Artificial Sequence
  Synthetic
atgatcccgcgtggcctgtctgaagctaaaccagcaactccggaaattcaagagatcgtcgataaggtgaaaccgcagctggaagagaaaacgaacgaaacctacggtaagctggaagcggtccagtacaaaacccaagtgctagcaggtcgtcagaccaaatctcatcagcattccaccaactattacattaaggttcgtgccggtgacaataagtatatgcacctgaaagtgttcaacggcccgcatcgtaaaaccaactggcattcttacgcggaccgtgttctgaccggttaccaggttgacaagaacaaagatgacgagctgacgggtttc

SEQ ID NO: 1123 - DNA, 336 bp, Artificial Sequence
  Synthetic
atgatcccgcgtggcctgtctgaagctaaaccagcaactccggaaattcaagagatcgtcgataaggtgaaaccgcagctggaagagaaaacgaacgaaacctacggtaagctggaagcggtccagtacaaaacccaagtgctagcaccatactctcgtcatcatcatcagctgtccaccaactattacattaaggttcgtgccggtgacaataagtatatgcacctgaaagtgttcaacggcccgtctggtgttcatcatgcagcagtttgggcggaccgtgttctgaccggttaccaggttgacaagaacaaagatgacgagctgacgggtttc

SEQ ID NO: 1124 - DNA, 336 bp, Artificial Sequence
  Synthetic
atgatcccgcgtggcctgtctgaagctaaaccagcaactccggaaattcaagagatcgtcgataaggtgaaaccgcagctggaagagaaaacgaacgaaacctacggtaagctggaagcggtccagtacaaaacccaagtgctagcagttcatggtgatcatacccgtgcatggtccaccaactattacattaaggttcgtgccggtgacaataagtatatgcacctgaaagtgttcaacggcccgcgttacgcatcttcttactgggaatgggcggaccgtgttctgaccggttaccaggttgacaagaacaaagatgacgagctgacgggtttc

SEQ ID NO: 1125 - DNA, 336 bp, Artificial Sequence
  Synthetic
atgatcccgcgtggcctgtctgaagctaaaccagcaactccggaaattcaagagatcgtcgataaggtgaaaccgcagctggaagagaaaacgaacgaaacctacggtaagctggaagcggtccagtacaaaacccaagtgctagcagattggcagaaacgcggtcgttcttggtccaccaactattacattaaggttcgtgccggtgacaataagtatatgcacctgaaagtgttcaacggcccgaaccagtctggtgttgttgttcaggttgcggaccgtgttctgaccggttaccaggttgacaagaacaaagatgacgagctgacgggtttc

SEQ ID NO: 1126 - DNA, 336 bp, Artificial Sequence
  Synthetic
atgatcccgcgtggcctgtctgaagctaaaccagcaactccggaaattcaagagatcgtcgataaggtgaaaccgcagctggaagagaaaacgaacgaaacctacggtaagctggaagcggtccagtacaaaacccaagtgctagcatacaactgggaacgttttcgtaaagtttccaccaactattacattaaggttcgtgccggtgacaataagtatatgcacctgaaagtgttcaacggcccgtaccataaccatcagcataccatccatgcggaccgtgttctgaccggttaccaggttgacaagaacaaagatgacgagctgacgggtttc

SEQ ID NO: 1127 - DNA, 336 bp, Artificial Sequence
  Synthetic
atgatcccgcgtggcctgtctgaagctaaaccagcaactccggaaattcaagagatcgtcgataaggtgaaaccgcagctggaagagaaaacgaacgaaacctacggtaagctggaagcggtccagtacaaaacccaagtgctagcaggttggtctcgtaacgtttggttttggtccaccaactattacattaaggttcgtgccggtgacaataagtatatgcacctgaaagtgttcaacggcccgaaacaggaactgggtaccaaaaccaccgcggaccgtgttctgaccggttaccaggttgacaagaacaaagatgacgagctgacgggtttc

SEQ ID NO: 1128 - DNA, 336 bp, Artificial Sequence
  Synthetic
atgatcccgcgtggcctgtctgaagctaaaccagcaactccggaaattcaagagatcgtcgataaggtgaaaccgcagctggaagagaaaacgaacgaaacctacggtaagctggaagcggtccagtacaaaacccaagtgctagcatctcagacccagcatcgtcgtcatcattccaccaactattacattaaggttcgtgccggtgacaataagtatatgcacctgaaagtgttcaacggcccgcttgttccacagcatcatcagcatcaggcggaccgtgttctgaccggttaccaggttgacaagaacaaagatgacgagctgacgggtttc

SEQ ID NO: 1129 - DNA, 336 bp, Artificial Sequence
  Synthetic
atgatcccgcgtggcctgtctgaagctaaaccagcaactccggaaattcaagagatcgtcgataaggtgaaaccgcagctggaagagaaaacgaacgaaacctacggtaagctggaagcggtccagtacaaaacccaagtgctagcaccaaacgttaaacataaacatcgttggtccaccaactattacattaaggttcgtgccggtgacaataagtatatgcacctgaaagtgttcaacggcccgtggcatgatatcgcaggtggtcattacgcggaccgtgttctgaccggttaccaggttgacaagaacaaagatgacgagctgacgggtttc

SEQ ID NO: 1130 - DNA, 336 bp, Artificial Sequence
  Synthetic
atgatcccgcgtggcctgtctgaagctaaaccggcaactccggaaattcaagagatcgtcgataaggtgaaaccgcagctggaagagaaaacgaacgaaacctacggtaagctggaagcggtccagtacaaaacccaagtgctagcaaaacatccagcatttcatcagcattcttccaccaactattacattaaggttcgtgccggtgacaataagtatatgcacctgaaagtgttcaacggcccgcgtcatgatctgcattaccattacccagcggaccgtgttctgaccggttaccaggttgacaagaacaaagatgacgagctgacgggtttc

SEQ ID NO: 1131 - DNA, 336 bp, Artificial Sequence
  Synthetic
atgatcccgcgtggcctgtctgaagctaaaccagcaactccggaaattcaagagatcgtcgataaggtgaaaccgcagctggaagagaaaacgaacgaaacctacggtaagctggaagcggtccagtacaaaacccaagtgctagcaccacatcatcataccgattggcgtacctccaccaactattacattaaggttcgtgccggtgacaataagtatatgcacctgaaagtgttcaacggcccgtactggcattggaaagttcgtcgttttgcggaccgtgttctgaccggttaccaggttgacaagaacaaagatgacgagctgacgggtttc

SEQ ID NO: 1132 - DNA, 336 bp, Artificial Sequence
  Synthetic
atgatcccgcgtggcctgtctgaagctaaaccagcaactccggaaattcaagagatcgtcgataaggtgaaaccgcagctggaagagaaaacgaacgaaacctacggtaagctggaagcggtccagtacaaaacccaagtgctagcacatacccataaaatcctgcattttcattccaccaactattacattaaggttcgtgccggtgacaataagtatatgcacctgaaagtgttcaacggcccggataaacagcgttacgaagataaacaggcggaccgtgttctgaccggttaccaggttgacaagaacaaagatgacgagctgacgggtttc

SEQ ID NO: 1133 - DNA, 336 bp, Artificial Sequence
  Synthetic
atgatcccgcgtggcctgtctgaagctaaaccagcaactccggaaattcaagagatcgtcgataaggtgaaaccgcagctggaagagaaaacgaacgaaacctacggtaagctggaagcggtccagtacaaaacccaagtgctagcaccaaaccatcatttttttctgcagttttccaccaactattacattaaggttcgtgccggtgacaataagtatatgcacctgaaagtgttcaacggcccgcagcatcatcatccacatcgtcatccagcggaccgtgttctgaccggttaccaggttgacaagaacaaagatgacgagctgacgggtttc

SEQ ID NO: 1134 - DNA, 336 bp, Artificial Sequence
  Synthetic
atgatcccgcgtggcctgtctgaagctaaaccagcaactccggaaattcaagagatcgtcgataaggtgaaaccgcagctggaagagaaaacgaacgaaacctacggtaagctggaagcggtccagtacaaaacccaagtgctagcacgtcgttacatcggtcataactactcttccaccaactattacattaaggttcgtgccggtgacaataagtatatgcacctgaaagtgttcaacggcccgtggcatcattttcataactcttacgatgcggaccgtgttctgaccggttaccaggttgacaagaacaaagatgacgagctgacgggtttc

SEQ ID NO: 1135 - DNA, 336 bp, Artificial Sequence
  Synthetic
atgatcccgcgtggcctgtctgaagctaaaccagcaactccggaaattcaagagatcgtcgataaggtgaaaccgcagctggaagagaaaacgaacgaaacctacggtaagctggaagcggtccagtacaaaacccaagtgctagcaacccattaccatcatcagtgggatccatccaccaactattacattaaggttcgtgccggtgacaataagtatatgcacctgaaagtgttcaacggcccgatctggtactctcatcgtccacgtgcagcggaccgtgttctgaccggttaccaggttgacaagaacaaagatgacgagctgacgggtttc

SEQ ID NO: 1136 - DNA, 333 bp, Artificial Sequence
  Synthetic
atgatcccgcgtggcctgtctgaagctaaaccagcaactccggaaattcaagagatcgtcgataaggtgaaaccgcagctggaagagaaaacgaacgaaacctacggtaagctggaagcggtccagtacaaaacccaagtgctagcagataaaaaacatggtcagtacaaatccaccaactattacattaaggttcgtgccggtgacaataagtatatgcacctgaaagtgttcaacggcccgtgggatgatcataccctgaaatggtacgcggaccgtgttctgaccggttaccaggttgacaagaacaaagatgacgagctgacgggtttc

SEQ ID NO: 1137 - DNA, 336 bp, Artificial Sequence
  Synthetic
atgatcccgcgtggcctgtctgaagctaaaccagcaactccggaaattcaagagatcgtcgataaggtgaaaccgcagctggaagagaaaacgaacgaaacctacggtaagctggaagcggtccagtacaaaacccaagtgctagcataccatatccagggtgtttactggcgttccaccaactattacattaaggttcgtgccggtgacaataagtatatgcacctgaaagtgttcaacggcccgatcgcattttggggtccaaaacgttttgcggaccgtgttctgaccggttaccaggttgacaagaacaaagatgacgagctgacgggtttc

SEQ ID NO: 1138 - DNA, 336 bp, Artificial Sequence
  Synthetic
atgatcccgcgtggcctgtctgaagctaaaccagcaactccggaaattcaagagatcgtcgataaggtgaaaccgcagctggaagagaaaacgaacgaaacctacggtaagctggaagcggtccagtacaaaacccaagtgctagcatctcgttttaaacatcatgttcgtaactccaccaactattacattaaggttcgtgccggtgacaataagtatatgcacctgaaagtgttcaacggcccgtttccacatcgtaacaaatctgatggtgcggaccgtgttctgaccggttaccaggttgacaagaacaaagatgacgagctgacgggtttc

SEQ ID NO: 1139 - DNA, 336 bp, Artificial Sequence
  Synthetic
atgatcccgcgtggcctgtctgaagctaaaccagcaactccggaaattcaagagatcgtcgataaggtgaaaccgcagctggaagagaaaacgaacgaaacctacggtaagctggaagcggtccagtacaaaacccaagtgctagcatggcatcatcagcatcatctgctggcatccaccaactattacattaaggttcgtgccggtgacaataagtatatgcacctgaaagtgttcaacggcccgtttaaacgttctcagcagtgggaatgggcggaccgtgttctgaccggttaccaggttgacaagaacaaagatgacgagctgacgggtttc

SEQ ID NO: 1140 - DNA, 336 bp, Artificial Sequence
  Synthetic
atgatcccgcgtggcctgtctgaagctaaaccagcaactccggaaattcaagagatcgtcgataaggtgaaaccgcagctggaagagaaaacgaacgaaacctacggtaagctggaagcggtccagtacaaaacccaagtgctagcacataacaaacatccatctccacgtgtttccaccaactattacattaaggttcgtgccggtgacaataagtatatgcacctgaaagtgttcaacggcccgaaacatcgttaccagccaacccattgggcggaccgtgttctgaccggttaccaggttgacaagaacaaagatgacgagctgacgggtttc

SEQ ID NO: 1141 - DNA, 336 bp, Artificial Sequence
  Synthetic
atgatcccgcgtggcctgtctgaagctaaaccagcaactccggaaattcaagagatcgtcgataaggtgaaaccgcagctggaagagaaaacgaacgaaacctacggtaagctggaagcggtccagtacaaaacccaagtgctagcaacctggtttcatcagcatgaacagcagtccaccaactattacattaaggttcgtgccggtgacaataagtatatgcacctgaaagtgttcaacggcccgtaccatgatatctgggcatggcatgttgcggaccgtgttctgaccggttaccaggttgacaagaacaaagatgacgagctgacgggtttc

SEQ ID NO: 1142 - DNA, 336 bp, Artificial Sequence
  Synthetic
atgatcccgcgtggcctgtctgaagctaaaccagcaactccggaaattcaagagatcgtcgataaggtgaaaccgcagctggaagagaaaacgaacgaaacctacggtaagctggaagcggtccagtacaaaacccaagtgctagcatggaaagaatggcgttaccatcatcagtccaccaactattacattaaggttcgtgccggtgacaataagtatatgcacctgaaagtgttcaacggcccggattttgttaaacatcatctgcatgatgcggaccgtgttctgaccggttaccaggttgacaagaacaaagatgacgagctgacgggtttc

SEQ ID NO: 1143 - DNA, 336 bp, Artificial Sequence
  Synthetic
atgatcccgcgtggcctgtctgaagctaaaccagcaactccggaaattcaagagatcgtcgataaggtgaaaccgcagctggaagagaaaacgaacgaaacctacggtaagctggaagcggtccagtacaaaacccaagtgctagcatttaccaaacattgggatcgttggtactccaccaactattacattaaggttcgtgccggtgacaataagtatatgcacctgaaagtgttcaacggcccgatctctgatcatgttcactttggttgggcggaccgtgttctgaccggttaccaggttgacaagaacaaagatgacgagctgacgggtttc

SEQ ID NO: 1144 - DNA, 336 bp, Artificial Sequence
  Synthetic
atgatcccgcgtggcctgtctgaagctaaaccagcaactccggaaattcaagagatcgtcgataaggtgaaaccgcagctggaagagaaaacgaacgaaacctacggtaagctggaagcggtccagtacaaaacccaagtgctagcaacccgtctgtacgatcattctgtttggtccaccaactattacattaaggttcgtgccggtgacaataagtatatgcacctgaaagtgttcaacggcccgtaccatcatcgtgatcattggggttgggcggaccgtgttctgaccggttaccaggttgacaagaacaaagatgacgagctgacgggtttc

SEQ ID NO: 1145 - DNA, 336 bp, Artificial Sequence
  Synthetic
atgatcccgcgtggcctgtctgaagctaaaccagcaactccggaaattcaagagatcgtcgataaggtgaaaccgcagctggaagagaaaacgaacgaaacctacggtaagctggaagcggtccagtacaaaacccaagtgctagcatgggaataccagacccatcatccagcatccaccaactattacattaaggttcgtgccggtgacaataagtatatgcacctgaaagtgttcaacggcccggaatggtttaccgttggtggtatcgcagcggaccgtgttctgaccggttaccaggttgacaagaacaaagatgacgagctgacgggtttc

SEQ ID NO: 1146 - DNA, 336 bp, Artificial Sequence
  Synthetic
atgatcccgcgtggcctgtctgaagctaaaccagcaactccggaaattcaagagatcgtcgataaggtgaaaccgcagctggaagagaaaacgaacgaaacctacggtaagctggaagcggtccagtacaaaacccaagtgctagcagttcattttcgttctcatcgtgatttttccaccaactattacattaaggttcgtgccggtgacaataagtatatgcacctgaaagtgttcaacggcccggaacgtaaacatgcacatcagcatccagcggaccgtgttctgaccggttaccaggttgacaagaacaaagatgacgagctgacgggtttc

SEQ ID NO: 1147 - DNA, 336 bp, Artificial Sequence
  Synthetic
atgatcccgcgtggcctgtctgaagctaaaccagcaactccggaaattcaagagatcgtcgataaggtgaaaccgcagctggaagagaaaacgaacgaaacctacggtaagctggaagcggtccagtacaaaacccaagtgctagcatctcgtcatacccatcatcatcgttcttccaccaactattacattaaggttcgtgccggtgacaataagtatatgcacctgaaagtgttcaacggcccggattctaacctgtacaacgaatggaacgcggaccgtgttctgaccggttaccaggttgacaagaacaaagatgacgagctgacgggtttc

SEQ ID NO: 1148 - DNA, 336 bp, Artificial Sequence
  Synthetic
atgatcccgcgtggcctgtctgaagctaaaccagcaactccggaaattcaagagatcgtcgataaggtgaaaccgcagctggaagagaaaacgaacgaaacctacggtaagctggaagcggtccagtacaaaacccaagtgctagcaaccgcacgttacgaacatgcaccaacctccaccaactattacattaaggttcgtgccggtgacaataagtatatgcacctgaaagtgttcaacggcccgaccgcaaaacattctcataaaaaacatgcggaccgtgttctgaccggttaccaggttgacaagaacaaagatgacgagctgacgggtttc

SEQ ID NO: 1149 - DNA, 336 bp, Artificial Sequence
  Synthetic
atgatcccgcgtggcctgtctgaagctaaaccagcaactccggaaattcaagagatcgtcgataaggtgaaaccgcagctggaagagaaaacgaacgaaacctacggtaagctggaagcggtccagtacaaaacccaagtgctagcacgtcatcgtaaagaatcttggtacgtttccaccaactattacattaaggttcgtgccggtgacaataagtatatgcacctgaaagtgttcaacggcccgaactggccacatggtatcgatccaaaagcggaccgtgttctgaccggttaccaggttgacaagaacaaagatgacgagctgacgggtttc

SEQ ID NO: 1150 - DNA, 336 bp, Artificial Sequence
  Synthetic
atgatcccgcgtggcctgtctgaagctaaaccagcaactccggaaattcaagagatcgtcgataaggtgaaaccgcagctggaagagaaaacgaacgaaacctacggtaagctggaagcggtccagtacaaaacccaagtgctagcagatcatggttacgcacgtggtcatcattccaccaactattacattaaggttcgtgccggtgacaataagtatatgcacctgaaagtgttcaacggcccgaaacatatccatgaacataaatctgaagcggaccgtgttctgaccggttaccaggttgacaagaacaaagatgacgagctgacgggtttc

SEQ ID NO: 1151 - DNA, 336 bp, Artificial Sequence
  Synthetic
atgatcccgcgtggcctgtctgaagctaaaccagcaactccggaaattcaagagatcgtcgataaggtgaaaccgcagctggaagagaaaacgaacgaaacctacggtaagctggaagcggtccagtacaaaacccaagtgctagcaaccccacataaaatctggcattggcattccaccaactattacattaaggttcgtgccggtgacaataagtatatgcacctgaaagtgttcaacggcccgaccaaaaaatttcatcagcatgaacgtgcggaccgtgttctgaccggttaccaggttgacaagaacaaagatgacgagctgacgggtttc

SEQ ID NO: 1152 - DNA, 336 bp, Artificial Sequence
  Synthetic
atgatcccgcgtggcctgtctgaagctaaaccagcaactccggaaattcaagagatcgtcgataaggtgaaaccgcagctggaagagaaaacgaacgaaacctacggtaagctggaagcggtccagtacaaaacccaagtgctagcatcttacgcacagcatacccgtctgcattccaccaactattacattaaggttcgtgccggtgacaataagtatatgcacctgaaagtgttcaacggcccgacccgtcatcatcagcattactacctggcggaccgtgttctgaccggttaccaggttgacaagaacaaagatgacgagctgacgggtttc

SEQ ID NO: 1153 - DNA, 336 bp, Artificial Sequence
  Synthetic
atgatcccgcgtggcctgtctgaagctaaaccagcaactccggaaattcaagagatcgtcgataaggtgaaaccgcagctggaagagaaaacgaacgaaacctacggtaagctggaagcggtccagtacaaaacccaagtgctagcaatcgatcatcgttaccattacctgcattccaccaactattacattaaggttcgtgccggtgacaataagtatatgcacctgaaagtgttcaacggcccgtggtactggacccagcatcatcgttgggcggaccgtgttctgaccggttaccaggttgacaagaacaaagatgacgagctgacgggtttc

SEQ ID NO: 1154 - DNA, 336 bp, Artificial Sequence
  Synthetic
atgatcccgcgtggcctgtctgaagctaaaccagcaactccggaaattcaagagatcgtcgataaggtgaaaccgcagctggaagagaaaacgaacgaaacctacggtaagctggaagcggtccagtacaaaacccaagtgctagcacatggttacaaccatcgtaaagttcagtccaccaactattacattaaggttcgtgccggtgacaataagtatatgcacctgaaagtgttcaacggcccgtaccatgtttggaactggcgtctgaaagcggaccgtgttctgaccggttaccaggttgacaagaacaaagatgacgagctgacgggtttc

SEQ ID NO: 1155 - DNA, 336 bp, Artificial Sequence
  Synthetic
atgatcccgcgtggcctgtctgaagctaaaccagcaactccggaaattcaagagatcgtcgataaggtgaaaccgcagctggaagagaaaacgaacgaaacctacggtaagctggaagcggtccagtacaaaacccaagtgctagcaggtcatctgaaagcagcaccatggcattccaccaactattacattaaggttcgtgccggtgacaataagtatatgcacctgaaagtgttcaacggcccgtttcatcattttcgtccacatcatcatgcggaccgtgttctgaccggttaccaggttgacaagaacaaagatgacgagctgacgggtttc

SEQ ID NO: 1156 - DNA, 336 bp, Artificial Sequence
  Synthetic
atgatcccgcgtggcctgtctgaagctaaaccagcaactccggaaattcaagagatcgtcgataaggtgaaaccgcagctggaagagaaaacgaacgaaacctacggtaagctggaagcggtccagtacaaaacccaagtgctagcaaaagaaaaatacgcatcttgggaacgttccaccaactattacattaaggttcgtgccggtgacaataagtatatgcacctgaaagtgttcaacggcccgtttctgaacggtaaaaaacgtcatgttgcggaccgtgttctgaccggttaccaggttgacaagaacaaagatgacgagctgacgggtttc

SEQ ID NO: 1157 - DNA, 336 bp, Artificial Sequence
  Synthetic
atgatcccgcgtggcctgtctgaagctaaaccagcaactccggaaattcaagagatcgtcgataaggtgaaaccgcagctggaagagaaaacgaacgaaacctacggtaagctggaagcggtccagtacaaaacccaagtgctagcaaaaggtcatccacatgcacatccacattccaccaactattacattaaggttcgtgccggtgacaataagtatatgcacctgaaagtgttcaacggcccgtggtggaaaatccatggttctaccgttgcggaccgtgttctgaccggttaccaggttgacaagaacaaagatgacgagctgacgggtttc

SEQ ID NO: 1158 - DNA, 336 bp, Artificial Sequence
  Synthetic
atgatcccgcgtggcctgtctgaagctaaaccagcaactccggaaattcaagagatcgtcgataaggtgaaaccgcagctggaagagaaaacgaacgaaacctacggtaagctggaagcggtccagtacaaaacccaagtgctagcaccataccgtcgtcatgaacatcatcagtccaccaactattacattaaggttcgtgccggtgacaataagtatatgcacctgaaagtgttcaacggcccgaactctgattttcatcataaccagcaggcggaccgtgttctgaccggttaccaggttgacaagaacaaagatgacgagctgacgggtttc

SEQ ID NO: 1159 - DNA, 336 bp, Artificial Sequence
  Synthetic
atgatcccgcgtggcctgtctgaagctaaaccagcaactccggaaattcaagagatcgtcgataaggtgaaaccgcagctggaagagaaaacgaacgaaacctacggtaagctggaagcggtccagtacaaaacccaagtgctagcaggttttccacattggtttgttcataactccaccaactattacattaaggttcgtgccggtgacaataagtatatgcacctgaaagtgttcaacggcccgacccatcatctgcgttaccatcatcaggcggaccgtgttctgaccggttaccaggttgacaagaacaaagatgacgagctgacgggtttc

SEQ ID NO: 1160 - DNA, 336 bp, Artificial Sequence
  Synthetic
atgatcccgcgtggcctgtctgaagctaaaccagcaactccggaaattcaagagatcgtcgataaggtgaaaccgcagctggaagagaaaacgaacgaaacctacggtaagctggaagcggtccagtacaaaacccaagtgctagcatttcgtcgttaccagtcttttcattactccaccaactattacattaaggttcgtgccggtgacaataagtatatgcacctgaaagtgttcaacggcccgttttacaaataccatcaggttcgttgggcggaccgtgttctgaccggttaccaggttgacaagaacaaagatgacgagctgacgggtttc

SEQ ID NO: 1161 - DNA, 336 bp, Artificial Sequence
  Synthetic
atgatcccgcgtggcctgtctgaagctaaaccagcaactccggaaattcaagagatcgtcgataaggtgaaaccgcagctggaagagaaaacgaacgaaacctacggtaagctggaagcggtccagtacaaaacccaagtgctagcaccacgttaccgtcatcatgttgattactccaccaactattacattaaggttcgtgccggtgacaataagtatatgcacctgaaagtgttcaacggcccgtactcttttcgtgatcatcattggtgggcggaccgtgttctgaccggttaccaggttgacaagaacaaagatgacgagctgacgggtttc

SEQ ID NO: 1162 - DNA, 336 bp, Artificial Sequence
  Synthetic
atgatcccgcgtggcctgtctgaagctaaaccagcaactccggaaattcaagagatcgtcgataaggtgaaaccgcagctggaagagaaaacgaacgaaacctacggtaagctggaagcggtccagtacaaaacccaagtgctagcagattacctgaaacgtaactttcgttactccaccaactattacattaaggttcgtgccggtgacaataagtatatgcacctgaaagtgttcaacggcccgccattttaccgtaaccatcatcatgaagcggaccgtgttctgaccggttaccaggttgacaagaacaaagatgacgagctgacgggtttc

SEQ ID NO: 1163 - DNA, 336 bp, Artificial Sequence
  Synthetic
atgatcccgcgtggcctgtctgaagctaaaccagcaactccggaaattcaagagatcgtcgataaggtgaaaccgcagctggaagagaaaacgaacgaaacctacggtaagctggaagcggtccagtacaaaacccaagtgctagcacgttctcatccaggtaaacatgttcattccaccaactattacattaaggttcgtgccggtgacaataagtatatgcacctgaaagtgttcaacggcccgtttcagctgaacctgcgttggggtcaggcggaccgtgttctgaccggttaccaggttgacaagaacaaagatgacgagctgacgggtttc

SEQ ID NO: 1164 - DNA, 336 bp, Artificial Sequence
  Synthetic
atgatcccgcgtggcctgtctgaagctaaaccagcaactccggaaattcaagagatcgtcgataaggtgaaaccgcagctggaagagaaaacgaacgaaacctacggtaagctggaagcggtccagtacaaaacccaagtgctagcacatcatcatcgttgggcaaaatggctgtccaccaactattacattaaggttcgtgccggtgacaataagtatatgcacctgaaagtgttcaacggcccggttcataactttcatgatatccgtcatgcggaccgtgttctgaccggttaccaggttgacaagaacaaagatgacgagctgacgggtttc

SEQ ID NO: 1165 - DNA, 336 bp, Artificial Sequence
  Synthetic
atgatcccgcgtggcctgtctgaagctaaaccagcaactccggaaattcaagagatcgtcgataaggtgaaaccgcagctggaagagaaaacgaacgaaacctacggtaagctggaagcggtccagtacaaaacccaagtgctagcagcagcacatcataaccattggcatatctccaccaactattacattaaggttcgtgccggtgacaataagtatatgcacctgaaagtgttcaacggcccggcacagcatggtcatgttccattttctgcggaccgtgttctgaccggttaccaggttgacaagaacaaagatgacgagctgacgggtttc

SEQ ID NO: 1166 - DNA, 336 bp, Artificial Sequence
  Synthetic
atgatcccgcgtggcctgtctgaagctaaaccagcaactccggaaattcaagagatcgtcgataaggtgaaaccgcagctggaagagaaaacgaacgaaacctacggtaagctggaagcggtccagtacaaaacccaagtgctagcaccagttcagaaacatgcaggttctcattccaccaactattacattaaggttcgtgccggtgacaataagtatatgcacctgaaagtgttcaacggcccgccatggcataacgcagaaatcaaacatgcggaccgtgttctgaccggttaccaggttgacaagaacaaagatgacgagctgacgggtttc

SEQ ID NO: 1167 - DNA, 336 bp, Artificial Sequence
  Synthetic
atgatcccgcgtggcctgtctgaagctaaaccagcaactccggaaattcaagagatcgtcgataaggtgaaaccgcagctggaagagaaaacgaacgaaacctacggtaagctggaagcggtccagtacaaaacccaagtgctagcagataactggcgtcattggcgtatctggtccaccaactattacattaaggttcgtgccggtgacaataagtatatgcacctgaaagtgttcaacggcccggcaggttggtcttctaacaaagcagatgcggaccgtgttctgaccggttaccaggttgacaagaacaaagatgacgagctgacgggtttc

SEQ ID NO: 1168 - DNA, 333 bp, Artificial Sequence
  Synthetic
atgatcccgcgtggcctgtctgaagctaaaccagcaactccggaaattcaagagatcgtcgataaggtgaaaccgcagctggaagagaaaacgaacgaaacctacggtaagctggaagcggtccagtacaaaacccaagtgctagcaccacgtcatcatcattgggcattttccaccaactattacattaaggttcgtgccggtgacaataagtatatgcacctgaaagtgttcaacggcccgaaacgtcagcatcatgatgttggtcaggcggaccgtgttctgaccggttaccaggttgacaagaacaaagatgacgagctgacgggtttc

SEQ ID NO: 1169 - DNA, 336 bp, Artificial Sequence
  Synthetic
atgatcccgcgtggcctgtctgaagctaaaccagcaactccggaaattcaagagatcgtcgataaggtgaaaccgcagctggaagagaaaacgaacgaaacctacggtaagctggaagcggtccagtacaaaacccaagtgctagcagtttcttacgatgatatcacctgggtttccaccaactattacattaaggttcgtgccggtgacaataagtatatgcacctgaaagtgttcaacggcccgaactcttcttacggttggctgtggtgggcggaccgtgttctgaccggttaccaggttgacaagaacaaagatgacgagctgacgggtttc

SEQ ID NO: 1170 - DNA, 336 bp, Artificial Sequence
  Synthetic
atgatcccgcgtggcctgtctgaagctaaaccagcaactccggaaattcaagagatcgtcgataaggtgaaaccgcagctggaagagaaaacgaacgaaacctacggtaagctggaagcggtccagtacaaaacccaagtgctagcaccacctcatccacgtgttcagcattactccaccaactattacattaaggttcgtgccggtgacaataagtatatgcacctgaaagtgttcaacggcccggcatttcgtgatcatcgtgcaccacatgcggaccgtgttctgaccggttaccaggttgacaagaacaaagatgacgagctgacgggtttc

SEQ ID NO: 1171 - DNA, 336 bp, Artificial Sequence
  Synthetic
atgatcccgcgtggcctgtctgaagctaaaccagcaactccggaaattcaagagatcgtcgataaggtgaaaccgcagctggaagagaaaacgaacgaaacctacggtaagctggaagcggtccagtacaaaacccaagtgctagcaaaacagtttcgtcatcatcagcatgaatccaccaactattacattaaggttcgtgccggtgacaataagtatatgcacctgaaagtgttcaacggcccgaaatggtggtctacccagggtatcgttgcggaccgtgttctgaccggttaccaggttgacaagaacaaagatgacgagctgacgggtttc

SEQ ID NO: 1172 - DNA, 336 bp, Artificial Sequence
  Synthetic
atgatcccgcgtggcctgtctgaagctaaaccagcaactccggaaattcaagagatcgtcgataaggtgaaaccgcagctggaagagaaaacgaacgaaacctacggtaagctggaagcggtccagtacaaaacccaagtgctagcagaacatcatgaataccattaccgttactccaccaactattacattaaggttcgtgccggtgacaataagtatatgcacctgaaagtgttcaacggcccgtttcgtccagttcatcatatccgtatcgcggaccgtgttctgaccggttaccaggttgacaagaacaaagatgacgagctgacgggtttc

SEQ ID NO: 1173 - DNA, 333 bp, Artificial Sequence
  Synthetic
atgatcccgcgtggcctgtctgaagctaaaccagcaactccggaaattcaagagatcgtcgataaggtgaaaccgcagctggaagagaaaacgaacgaaacctacggtaagctggaagcggtccagtacaaaacccaagtgctagcacatcatcatcatcgtcagcatccatccaccaactattacattaaggttcgtgccggtgacaataagtatatgcacctgaaagtgttcaacggcccgaaagttggtcagggtgttaacctgggtgcggaccgtgttctgaccggttaccaggttgacaagaacaaagatgacgagctgacgggtttc

SEQ ID NO: 1174 - DNA, 336 bp, Artificial Sequence
  Synthetic
atgatcccgcgtggcctgtctgaagctaaaccagcaactccggaaattcaagagatcgtcgataaggtgaaaccgcagctggaagagaaaacgaacgaaacctacggtaagctggaagcggtccagtacaaaacccaagtgctagcaaaactgcatcaggcacatcattggcattccaccaactattacattaaggttcgtgccggtgacaataagtatatgcacctgaaagttttcaacggcccggaatggtctaacaaacattaccagtgggcggaccgtgttctgaccggttaccaggttgacaagaacaaagatgacgagctgacgggtttc

SEQ ID NO: 1175 - DNA, 336 bp, Artificial Sequence
  Synthetic
atgatcccgcgtggcctgtctgaagctaaaccagcaactccggaaattcaagagatcgtcgataaggtgaaaccgcagctggaagagaaaacgaacgaaacctacggtaagctggaagcggtccagtacaaaacccaagtgctagcagaataccatcattacggtacctctcgttccaccaactattacattaaggttcgtgccggtgacaataagtatatgcacctgaaagtgttcaacggcccgcgtcagctgaaacatcataccaactttgcggaccgtgttctgaccggttaccaggttgacaagaacaaagatgacgagctgacgggtttc

SEQ ID NO: 1176 - DNA, 336 bp, Artificial Sequence
  Synthetic
atgatcccgcgtggcctgtctgaagctaaaccagcaactccggaaattcaagagatcgtcgataaggtgaaaccgcagctggaagagaaaacgaacgaaacctacggtaagctggaagcggtccagtacaaaacccaagtgctagcagataacaaacatatcccacagcgtcagtccaccaactattacattaaggttcgtgccggtgacaataagtatatgcacctgaaagtgttcaacggcccgcgtaaccatgttgcagaaaaatactgggcggaccgtgttctgaccggttaccaggttgacaagaacaaagatgacgagctgacgggtttc

SEQ ID NO: 1177 - DNA, 336 bp, Artificial Sequence
  Synthetic
atgatcccgcgtggcctgtctgaagctaaaccagcaactccggaaattcaagagatcgtcgataaggtgaaaccgcagctggaagagaaaacgaacgaaacctacggtaagctggaagcggtccagtacaaaacccaagtgctagcacataaacagtggcagtggaccatcgtttccaccaactattacattaaggttcgtgccggtgacaataagtatatgcacctgaaagtgttcaacggcccggcatacaaatctgataaaatccgtaaagcggaccgtgttctgaccggttaccaggttgacaagaacaaagatgacgagctgacgggtttc

SEQ ID NO: 1178 - DNA, 336 bp, Artificial Sequence
  Synthetic
atgatcccgcgtggcctgtctgaagctaaaccagcaactccggaaattcaagagatcgtcgataaggtgaaaccgcagctggaagagaaaacgaacgaaacctacggtaagctggaagcggtccagtacaaaacccaagtgctagcataccgtatcggtcatggtgttcagcattccaccaactattacattaaggttcgtgccggtgacaataagtatatgcacctgaaagtgttcaacggcccgtacgataaaccatacatcgtttggatcgcggaccgtgttctgaccggttaccaggttgacaagaacaaagatgacgagctgacgggtttc

SEQ ID NO: 1179 - DNA, 336 bp, Artificial Sequence
  Synthetic
atgatcccgcgtggcctgtctgaagctaaaccagcaactccggaaattcaagagatcgtcgataaggtgaaaccgcagctggaagagaaaacgaacgaaacctacggtaagctggaagcggtccagtacaaaacccaagtgctagcagatcaggttcgtcgtatcccacatcattccaccaactattacattaaggttcgtgccggtgacaataagtatatgcacctgaaagtgttcaacggcccgcatgataaacatccacagtcttgggcagcggaccgtgttctgaccggttaccaggttgacaagaacaaagatgacgagctgacgggtttc

SEQ ID NO: 1180 - DNA, 336 bp, Artificial Sequence
  Synthetic
atgatcccgcgtggcctgtctgaagctaaaccagcaactccggaaattcaagagatcgtcgataaggtgaaaccgcagctggaagagaaaacgaacgaaacctacggtaagctggaagcggtccagtacaaaacccaagtgctagcagaaggtaaacatgaatttcgttttcagtccaccaactattacattaaggttcgtgccggtgacaataagtatatgcacctgaaagtgttcaacggcccgtgggataaacatcgtcagcatctgtgggcggaccgtgttctgaccggttaccaggttgacaagaacaaagatgacgagctgacgggtttc

SEQ ID NO: 1181 - DNA, 336 bp, Artificial Sequence
  Synthetic
atgatcccgcgtggcctgtctgaagctaaaccagcaactccggaaattcaagagatcgtcgataaggtgaaaccgcagctggaagagaaaacgaacgaaacctacggtaagctggaagcggtccagtacaaaacccaagtgctagcacattactggggtcgttggtacaaaatctccaccaactattacattaaggttcgtgccggtgacaataagtatatgcacctgaaagtgttcaacggcccgtttcatgcattttggcatctggcatacgcggaccgtgttctgaccggttaccaggttgacaagaacaaagatgacgagctgacgggtttc

SEQ ID NO: 1182 - protein, 9 aa, Artificial Sequence
  Synthetic
REGRQDWVL

SEQ ID NO: 1183 - protein, 9 aa, Artificial Sequence
  Synthetic
WVPFPHQQL

SEQ ID NO: 1184 - protein, 398 aa, Artificial Sequence
  Synthetic
MIPRGLSEAKPATPEIQEIVDKVKPQLEEKTNETYGKLEAVQYKTQVLALSFNNYHWHSTNYYIKVRAGDNKYMHLKVFNGPKLRHDKLTHADRVLTGYQVDKNKDDELTGFAEAAAKEAAAKEAAAKEAAAKEAAAKEAAAKMIPRGLSEAKPATPEIQEIVDKVKPQLEEKTNETYGKLEAVQYKTQVLAREGRQDWVLSTNYYIKVRAGDNKYMHLKVFNGPWVPFPHQQLADRVLTGYQVDKNKDDELTGFAEAAAKEAAAKEAAAKEAAAKEAAAKEAAAKMIPRGLSEAKPATPEIQEIVDKVKPQLEEKTNETYGKLEAVQYKTQVLAREGRQDWVLSTNYYIKVRAGDNKYMHLKVFNGPWVPFPHQQLADRVLTGYQVDKNKDDELTGF

SEQ ID NO: 1185 - protein, 6 aa, Artificial Sequence
  Synthetic
HHHHHH

SEQ ID NO: 1186 - protein, 10 aa, Artificial Sequence
  Synthetic
EQKLISEEDL

SEQ ID NO: 1187 - protein, 7 aa, Artificial Sequence
  Synthetic
  MISC_FEATURE (7)..(7): Xaa may be Gly or Ser
ENLYFQX

1. A polypeptide comprising an FcRn binding recombinantly engineered variant of stefin sequence that binds to human FcRn with a K_{d} of 1×10⁻⁶M or less at pH 6.0, and optionally, a K_{d} for binding human FcRn at pH 7.4 that is at least half a log greater than the K_{d} for binding at pH 6.0.

2. (canceled)

3. (canceled)

4. The polypeptide of claim 1, wherein the polypeptide comprising (i) an FcRn binding recombinantly engineered variant of stefin polypeptide sequence which binds to human FcRn, and (ii) a heterologous polypeptide covalently associated to the FcRn binding recombinantly engineered variant of stefin polypeptide sequence Optionally as a fusion protein or chemically conjugated, which confers a therapeutic activity in human patients.

5. (canceled)

6. The polypeptide of claim 1, wherein the polypeptide A protein comprising an FcRn binding recombinantly engineered variant of stefin polypeptide sequence which binds to human FcRn and has an amino acid sequence that can be encoded by a nucleic acid having a coding sequence that hybridizes to any one of SEQ ID NOs: 888 to 1181 under stringent conditions of 6× sodium chloride/sodium citrate (SSC) at 45° C. followed by a wash in 0.2×SSC at 65° C.

7. The polypeptide of claim 1, wherein the FcRn binding recombinantly engineered variant of stefin sequence binds to FcRn with a K_{d} of 1×10⁻⁷ M or less at pH 6.0, a K_{d} of 1×10⁻⁸ M or less at pH 6.0, or K_{d} of 1×10⁻⁹ M or less at pH 6.0.

8. The polypeptide of claim 1, wherein the FcRn binding recombinantly engineered variant of stefin sequence binds to FcRn at pH 7.4 with a K_{d} that is at least one log greater than the K_{d} for binding to FcRn at pH 6.0, at least 1.5 logs greater than the K_{d} for binding to FcRn at pH 6, at least 2 logs greater than the K_{d} for binding to FcRn at pH 6, or at least 2.5 log greater than the K_{d} for binding to FcRn at pH 6.

9. The polypeptide of claim 1, wherein the polypeptide has a serum half-life in human patients of greater than 10 hours, greater than 24 hours, greater than 48 hours, greater than 72 hours, greater than 96 hours, greater than 120 hours, greater than 144 hours, greater than 168 hours, greater than 192 hours, greater than 216 hours, greater than 240 hours, greater than 264 hours, greater than 288 hours, greater than 312 hours, greater than 336 hours or, greater than 360 hours.

10. The polypeptide of claim 1, wherein the polypeptide has a serum half-life in human patients of greater than 50%, greater than 60%, greater than 70%, or greater than 80% of the serum half-life of IgG and/or
wherein the polypeptide has a serum half-life in human patients of greater than 50%, greater than 60%, greater than 70%, or greater than 80% of the serum half-life of serum albumin.

11. (canceled)

12. The polypeptide of claim 1, wherein the polypeptide does not inhibit binding of human serum albumin to human FcRn.

13. (canceled)

14. (canceled)

15. The polypeptide of claim 1 comprising an amino acid sequence represented in general formula (I)
FR1-(Xaa)ₙ-FR2-(Xaa)ₘ-FR3 (I),
wherein
FR1 is an amino acid sequence having at least 70% identity to MIPGGLSEAK PATPEIQEIV DKVKPQLEEK TNETYGKLEA VQYKTQVLA (SEQ ID NO: 1);
FR2 is an amino acid sequence having at least 70% identity to GTNYYIKVRA GDNKYMHLKV FKSL (SEQ ID NO: 2);
FR3 is an amino acid sequence having at least 70% identity to EDLVLTGYQV DKNKDDELTG F (SEQ ID NO: 3); and
Xaa, individually for each occurrence, is an amino acid,
n is an integer from 3 to 20, and m is an integer from 3 to 20.

16. The polypeptide of claim 15, wherein:
FR1 has at least 80%, at least 82%, at least 84%, at least 86%, at least 88%, at least 90%, at least 92%, at least 94%, at least 96%, or at least 98% identity to SEQ ID NO: 1;
FR2 has at least 80%, at least 84%, at least 88%, at least 92%, or at least 96% identity to SEQ ID NO: 2; and/or.
FR3 has at least 80%, at least 85%, at least 90%, or at least 95% identity to SEQ ID NO: 3.

17. The polypeptide of claim 15, wherein:
FR1 comprises the amino acid sequence of SEQ ID NO: 1;
FR2 comprises the amino acid sequence of SEQ ID NO: 2; and/or
FR3 comprises the amino acid sequence of SEQ ID NO: 3.

18. The polypeptide of claim 15, wherein (Xaa)ₙ is an amino acid sequence represented in the general formula
-Xaa-Xaa2-Xaa3-Xaa4-Xaa5-Xaa6-Xaa7-Xaa-Xaa- (SEQ ID NO: 4)
wherein Xaa, Xaa2, Xaa3, Xaa4, Xaa5, Xaa6 and Xaa7, individually for each occurrence, is an amino acid residue, with the caveat that (i) at least two of Xaa2, Xaa3, Xaa4 or Xaa5 are selected from His, Lys or Arg, or (ii) at least two of Xaa4, Xaa5, Xaa6 or Xaa7 are selected from His, Lys or Arg.

19. The polypeptide of claim 18, wherein at least three, and preferably four of Xaa2, Xaa3, Xaa4, Xaa5, Xaa6 or Xaa7 are selected from His, Lys or Arg.

20. The polypeptide of claim 15, wherein (Xaa)ₙ is at least 75% identical to the Loop 2 sequence selected from SEQ ID NOs: 6-299 and 1182.

21. The polypeptide of claim 15, wherein (Xaa)ₙ, is an amino acid sequence represented in the general formula
-Xaa-Xaa8-Xaa9-Xaa10-Xaa11-Xaa12-Xaa13-Xaa14-Xaa- (SEQ ID NO: 5)
wherein Xaa, Xaa8, Xaa9, Xaa10, Xaa11, Xaa12, Xaa13 and Xaa14, individually for each occurrence, is an amino acid residue, with the caveat that at least three of Xaa8, Xaa9, Xaa10, Xaa11, Xaa12, Xaa13 and Xaa14 are selected from His, Lys or Arg, and at least an additional two of Xaa8, Xaa9, Xaa10, Xaa11, Xaa12, Xaa13 and Xaa14 are selected from His, Lys, Arg, Phe, Tyr or Trp.

22. The polypeptide of claim 15, wherein (Xaa)ₘ is at least 75% identical to the Loop 4 sequence selected from SEQ ID NOs: 300-593 and 1183.

23. The polypeptide of claim 1, wherein the polypeptide includes at least one cysteine, which is (optionally) available for chemical conjugation, and which (optionally) is located at the C-terminal end or the N-terminal end of the polypeptide, and/or
wherein the polypeptide further comprising a heterologous polypeptide covalently linked through an amide bond to form a contiguous fusion protein.

24. (canceled)

25. The polypeptide of claim 23, wherein the heterologous polypeptide comprises a therapeutic polypeptide.

26. The polypeptide of claim 25, wherein the therapeutic polypeptide is selected from the group consisting of polypeptide hormones, polypeptide cytokines, polypeptide chemokines, growth factors, hemostasis active polypeptides, enzymes, and toxins,
wherein the therapeutic polypeptide is selected from the group consisting of receptor traps and receptor ligands,
wherein the therapeutic polypeptide sequence is selected from the group consisting of angiogenic agents and anti-angiogenic agents,
wherein the therapeutic polypeptide sequence is a neurotransmitter, and optionally wherein the neurotransmitter is Neuropeptide Y,
wherein the therapeutic polypeptide sequence is an erythropoiesis-stimulating agent, and optionally wherein the erythropoiesis-stimulating agent is erythropoietin or an erythropoietin mimetic,
wherein the therapeutic polypeptide is an incretin, and optionally wherein the incretin is selected from the group consisting of glucagon, gastric inhibitory peptide (GIP), glucagon-like peptide-1 (GLP-1), glucagon-like peptide-2 (GLP-2), peptide YY (PYY), and oxyntomodulin (OXM),
wherein the therapeutic polypeptide is an anticancer immune enhancing agent, such as a checkpoint inhibitor, a costimulatory receptor agonist or an iducer of innate immunity, and/or
wherein the therapeutic polypeptide is an anti-inflammatory immune inhibiting agent, such as a checkpoint agonist, a costimulatory receptor antagonist or an inhibitor of innate immunity.

27.-33. (canceled)

34. A pharmaceutical composition suitable for therapeutic use in a human patient, comprising a polypeptide of claim 1, and a pharmaceutically acceptable excipient.

35. The pharmaceutical composition of claim 34, wherein the pharmaceutical composition is formulated for pulmonary delivery or topical application.

36. The pharmaceutical composition of claim 35, wherein the pulmonary delivery is intranasal delivery.

37. A polynucleotide comprising a sequence encoding the polypeptide of claim 1.

38.-45. (canceled)

46. A viral vector comprising the polynucleotide of claim 37.

47. A plasmid or minicircle comprising the polynucleotide claim 37.

48. A cell comprising the polypeptide of claim 1, the polynucleotide of claim 37, the viral vector of claim 46, or the plasmid or minicircle of claim 47.

49. A method of increasing serum half-life of a therapeutic molecule, the method comprising conjugating the polypeptide of claim 1 to the therapeutic molecule.

50. A polypeptide of claim 1 for use in a method for treating an autoimmune disease and/or an inflammatory disease.

51. A polypeptide of claim 1 for use in a method for treating cancer.

52. A polypeptide of claim 1 for use in a method for treating cardiovascular or metabolic disease or disorder.

53. A method of producing the polypeptide of claim 1, the method comprising expressing in a host cell a nucleic acid encoding the polypeptide, and optionally isolating the polypeptide from the host cell.

54. A protein comprising an FcRn binding recombinantly engineered variant of stefin polypeptide sequence which binds to human FcRn and inhibits the binding of human IgG to human FcRn.

55. The protein of claim 54 for use in a method for treating an autoimmune or inflammatory disorder or disease.

56. A pharmaceutical composition suitable for therapeutic use in a human patient, comprising a protein of claim 54, and a pharmaceutically acceptable excipient.

57. The polypeptide of claim 1 comprising a loop 2 amino acid sequence of any one of SEQ ID NOs: 6-299 and 1182.

58. The polypeptide of claim 1 comprising a loop 4 amino acid sequence of any one of SEQ ID NOs: 300-593 and 1183.

59. The polypeptide of claim 1 comprising an amino acid sequence having at least 80%, at least 85%, at least 90%, at least 95%, at least 98%, or 100% identity to the sequence of any one of SEQ ID NOs: 594-887 or 1184.

60. The polypeptide of claim 1 encoded by a nucleic acid sequence having at least 70%, at least 75%, at least 80%, at least 85%, at least 90%, at least 95%, at least 98%, or 100% identity to the sequence of any one of SEQ ID NOs: 888-1181.

61. A use of the polynucleotide of claim 1 for targeting FcRn.

62. A use of the polynucleotide of claim 1 for increasing serum half-life of a therapeutic molecule.
